(19) United States
(12) Patent Application Publication
(10) Pub. No.: US 2023/0295664 A1
(43) Pub. Date: Sep. 21, 2023

(54) METHODS AND COMPOSITIONS FOR THE ADAR-MEDIATED EDITING OF LEUCINE RICH REPEAT KINASE 2 (LRRK2)

(71) Applicant: Korro Bio, Inc., Cambridge, MA (US)

(72) Inventors: Matthew Jarpe, Quincy, MA (US); Mallikarjuna Reddy Putta, Lexington, MA (US); Andrew Fraley, Arlington, MA (US)

(21) Appl. No.: 17/986,014

(22) Filed: Nov. 14, 2022

Related U.S. Application Data
(63) Continuation of application No. PCT/US2021/032140, filed on May 13, 2021.
(60) Provisional application No. 63/025,246, filed on May 15, 2020.

(51) Int. Cl. C12N 15/90; C12N 15/11; C12N 9/78

(52) U.S. Cl. CPC C12N 15/90; C12N 15/11; C12N 9/78; C12Y 305/04004; C12N 2310/20; C12N 2310/314; C12N 2310/321

(57) ABSTRACT

The present invention relates to methods and compositions for editing an LRRK2 polynucleotide, e.g., an LRRK2 polynucleotide comprising a SNP associated with Parkinson's Disease. The invention also relates to methods and compositions for treating or preventing Parkinson's Disease in a subject.

### RELATED APPLICATION

[0001] This application is a 35 § U.S.C. 111(a) continuation application which claims the benefit of priority to PCT/US2021/032140, filed on May 13, 2021, which in turn claims the benefit of priority to U.S. Provisional Application No. 63/025,246, filed on May 15, 2020. The entire contents of each of the foregoing applications are incorporated herein by reference.

### SEQUENCE LISTING

[0002] The instant application contains a Sequence Listing which has been submitted electronically in XML file format and is hereby incorporated by reference in its entirety. Said XML copy, created on Jan. 20, 2023, is named 131522_00402_SL.XML and is 3,044,253 bytes in size.

### BACKGROUND OF THE INVENTION

[0003] Parkinson's Disease (PD) is one of the most common neurodegenerative disorders in the world. It affects over one million Americans and more than 60,000 patients are newly diagnosed annually. PD is generally classified by somatic symptoms including tremors, rigidity, bradykinesis, and postural problems. In the early stages of the disease, there may be only slight disturbances of posture, locomotion, facial expressions, or speech. Symptoms may initially manifest as asymmetric, however as the disease progresses, the symptoms become bilateral and progressively debilitating. PD patients also commonly experience dementia, ataxia, dysphasia, and mood disorders, and the quality and life expectancy of patients with PD is substantially reduced. The neuropathological hallmarks are characterized by a progressive loss of dopaminergic neurons in the substantia nigra pars compacta and the presence of proteinaceous inclusions immunoreactive for α-synuclein termed as Lewy bodies and dystrophic Lewy neurites in surviving neurons. Traditionally, PD has been considered a sporadic neurodegenerative disorder. However increasing evidences of family aggregation indicate that there may be a link between PD and gene.

[0004] To date, many genes have been studied and isolated to be responsible for PD based on family based linkage analysis. Among all the causative genes, mutations in LRRK2 and α-synuclein have been proved to associate with autosomal dominant PD, while mutations in parkin, PINK1, DJ-1, and ATP13A2 are linked to autosomal recessive PD. Mutations in LRRK2 are the most common genetic cause, accounting for 4% of familial PD and 1% of sporadic PD across all populations (Kumari U, et al., FEBS J. 2009, 276: 6455-6463).

[0005] The product of the LRRK2 gene is a highly conserved large 286-kDa protein that contains multiple, independent domains belonging to the ROCO protein family. Specifically, the LRRK2 protein contains two enzymatic domains, a GTPase and a kinase domain, and multiple protein-protein interaction domains including a leucine-rich repeat (LRR), a WD40 repeat, and a LRRK2 specific repeat domain. LRRK2 interaction domains are thought to serve as protein binding modules where LRRK2 acts as a signaling scaffold. LRRK2 GTPase and kinase enzyme activity are important in regulating LRRK2 dependent cellular signaling pathways and may reciprocally regulate each other to direct LRRK2's ultimate function. Several mutations of this gene have been demonstrated to be pathogenic. Established dominant inherited PD-associated mutations include G2019S, R1441C/G/H, Y1699C, I2020T and N1437H (Bardien S, et al., Parkinsonism Relat Disord. 2011, 17: 501-508).

[0006] Research work in both in vitro and in vivo systems suggests that LRRK2 is involved in diverse pathways and cellular signaling including regulation of protein translation, vesicle trafficking, neurite outgrowth, autophagy, cytoskeletal dynamics and the immune system (Rideout H J, et al., Neurochem Res. 2014, 39: 576-592; Martin I, et al., J Neurochem. 2014; 131(5):554-565). Several model systems have been developed to study LRRK2 function from yeast to invertebrates such as Drosophila and C. elegans, rodents, and patient-derived induced pluripotent stem cells (iPScs) (Daniel G, et al., Curr Top Behav Neurosci. 2015; 22:331-368).

[0007] Although tremendous effort has been made to find an effective treatment or cure for PD, most PD patients have experienced little relief from current treatment regimes, which include medications, surgeries, rehabilitation therapy and implants. Many of the benefits provided from standard treatments are relatively insignificant and are often accompanied by appreciable toxicity. The most common current therapy for PD is oral administration of L-DOPA, also known as levodopa and 1-3,4-dihydroxyphenylalanine. However, there are certain limitations associated with its use. It requires large daily dosage; the therapeutic benefits are achieved only after a delayed onset of 1-2 months; and it has a number of side effects both central and peripheral and may cause adverse side effects in patients with cardiovascular or pulmonary disease, asthma, or renal, hepatic, or endocrine disease. Given the critical role that LRRK2 plays in the development of Parkinson's Disease, LRRK2 constitutes an important therapeutic target.

[0008] Accordingly, there exists an ongoing need for novel methods that can selectively and efficiently edit the LRRK2 gene, and correct any pathogenic mutations in the gene in order to treat and/or prevent Parkinson's Disease.

### SUMMARY OF THE INVENTION

[0009] The present invention provides methods and compositions for editing an LRRK2 polynucleotide and methods of treating or preventing an LRRK2-associated disease, e.g., Parkinson's Disease, in a subject using a guide oligonucleotide capable of effecting an adenosine deaminase acting on RNA (ADAR)-mediated adenosine to inosine alteration in the target gene.

[0010] The present invention provides methods for site specific editing of LRRK2 in a cell, without the need to transduce or transfect the cell with genetically engineered editing enzymes. The design of the guide oligonucleotides of the present invention allows the recruitment of the ADAR enzyme, to the specific editing sites disclosed herein. The methods of the present invention can conveniently be used to make changes in LRRK2, for example to reverse mutations that are involved in, or cause, LRRK2-associated disease, thereby alleviating the symptoms of the disease. This is of great advantage when used in treating the LRRK2-associated disease, e.g., Parkinson's Disease. Further, the guide oligonucleotides used in the methods of the present invention provide an ease of delivery and avoid any immune response, e.g., associated with viral vectors. Editing of the existing mutant gene preserves the endogenous transcriptional control of the gene including cell type specificity, control by exogenous stimuli, and splice variation, that is not preserved by expression of the gene by an introduced vector.

[0011] The invention provides, in one aspect, a method of editing an LRRK2 polynucleotide comprising a single nucleotide polymorphism (SNP) associated with Parkinson's Disease. The method comprises contacting the LRRK2 polynucleotide with a guide oligonucleotide capable of effecting an adenosine deaminase acting on RNA (ADAR)-mediated adenosine to inosine alteration of the SNP associated with Parkinson's Disease, thereby editing the LRRK2 polynucleotide.

[0012] In some embodiments, the LRRK2 polynucleotide is contacted with the guide oligonucleotide in a cell. In some embodiments, the cell endogenously expresses ADAR. In some embodiments, the ADAR is a human ADAR. In some embodiments, the ADAR is human ADAR1. In other embodiments, the ADAR is human ADAR2.

[0013] In some embodiments, the cell is selected from eukaryotic cell, a mammalian cell, and a human cell. In some embodiments, the cell is in vivo. In other embodiments, the cell is ex vivo.

[0014] In one aspect, the present invention provides a method of treating Parkinson's Disease in a subject in need thereof. The method comprises identifying a subject with a single nucleotide polymorphism (SNP) associated with Parkinson's Disease in an LRRK2 polynucleotide; contacting the LRRK2 polynucleotide in a cell of the subject with a guide oligonucleotide capable of effecting an adenosine deaminase acting on RNA (ADAR)-mediated adenosine to inosine alteration of the SNP associated with Parkinson's Disease, thereby treating the subject.

[0015] In another aspect, the present invention provides a method of treating Parkinson's Disease in a subject in need thereof. The method comprises identifying a subject with a single nucleotide polymorphism (SNP) associated with Parkinson's Disease in an LRRK2 polynucleotide; contacting the LRRK2 polynucleotide in a cell with a guide oligonucleotide capable of effecting an adenosine deaminase acting on RNA (ADAR)-mediated adenosine to inosine alteration of the SNP associated with Parkinson's Disease, and administering the cell to the subject, thereby treating the subject.

[0016] In some embodiments, the cell is autologous, allogenic, or xenogenic to the subject. In some embodiments, the subject is a human subject.

[0017] In some embodiments, the guide oligonucleotide comprises a nucleic acid sequence complementary to an LRRK2 mRNA sequence comprising the SNP associated with Parkinson's Disease. In some embodiments, the oligonucleotide further comprises one or more adenosine deaminase acting on RNA (ADAR)-recruiting domains.

[0018] In some embodiments, the LRRK2 polynucleotide encodes an LRRK2 protein comprising a pathogenic amino acid comprising a serine at position 2019 or a histidine at position 1441 resulting from the SNP.

[0019] In some embodiments, the adenosine to inosine alteration substitutes the pathogenic amino acid with a wild type amino acid. In other embodiments, the wild type amino acid at position 2019 comprises a glycine, and wherein the wild type amino acid at position 1441 comprises an arginine.

[0020] In some embodiments, the guide oligonucleotide comprises the structure:

[Aₘ]-X¹—X²—X³—[Bₙ]

[0021] wherein each of A and B is a nucleotide; m and n are each, independently, an integer from 1 to 50; X¹, X², and X³ are each, independently, a nucleotide, wherein at least one of X¹, X², or X³ is an alternative nucleotide.

[0022] In other embodiments, the guide oligonucleotide comprises the structure:

[Aₘ]-X¹—X²—X³—[Bₙ]

[0023] wherein each of A and B is a nucleotide; m and n are each, independently, an integer from 1 to 50; X¹, X², and X³ are each, independently, a nucleotide, wherein at least one of X¹, X², or X³ has the structure of any one of Formula I-V:

[chemical structure]

[0024] wherein N¹ is hydrogen or a nucleobase; R¹ is hydroxy, halogen, or C₁-C₆ alkoxy; R² is hydrogen, hydroxy, halogen, or C₁-C₆ alkoxy; R³ is hydrogen, hydroxy, halogen, or C₁-C₆ alkoxy; R⁴ is hydrogen, hydroxy, halogen, or C₁-C₆ alkoxy; and R⁵ is hydrogen, hydroxy, halogen, or C₁-C₆ alkoxy. In some embodiments, R⁴ is hydrogen and R⁵ is not hydrogen or hydroxy, R⁵ is hydrogen and R⁴ is not hydrogen, or R⁵ is hydroxy and R⁴ is not hydrogen.

[0025] In some embodiments, at least 80% of the nucleotides of [Aₘ] and/or [Bₙ] include a nucleobase, a sugar, and an internucleoside linkage.

[0026] In some embodiments, R¹ is hydroxy, halogen, or OCH₃. In other embodiments, R² is hydrogen.

[0027] In some embodiments, at least one of X¹, X², or X³ has the structure of Formula I, Formula II, or Formula V; and none of X¹, X², or X³ has the structure of Formula IV or Formula III. In other embodiments, at least one of X¹, X², or X³ has the structure of Formula I or Formula II; and none of X¹, X², or X³ has the structure of Formula III, Formula IV, or Formula V.

[0028] In some embodiments, the halogen is fluoro.

[0029] In other embodiments, at least one of X¹, X², and X³ has the structure of Formula I, wherein R¹ is fluoro and N¹ is a nucleobase. In some embodiments, X¹ has the structure of Formula I, wherein R¹ is fluoro and N¹ is a nucleobase. In other embodiments, X² has the structure of Formula I, wherein R¹ is fluoro and N¹ is a nucleobase. In some embodiments, X³ has the structure of Formula I, wherein R¹ is fluoro and N¹ is a nucleobase. In other embodiments, at least one of X¹, X², and X³ has the structure of Formula I, wherein R¹ is hydroxy and N¹ is a nucleobase. In some embodiments, X¹ has the structure of Formula I, wherein R¹ is hydroxy and N¹ is a nucleobase. In other embodiments, X² has the structure of Formula I, wherein R¹ is hydroxy and N¹ is a nucleobase. In some embodiments, X³ has the structure of Formula I, wherein R¹ is hydroxy and N¹ is a nucleobase. In other embodiments, at least one of X¹, X², and X³ has the structure of Formula I, wherein R¹ is methoxy and N¹ is a nucleobase. In some embodiments, X¹ has the structure of Formula I, wherein R¹ is methoxy and N¹ is a nucleobase; and each of X² and X³ is a ribonucleotide. In other embodiments, X² has the structure of Formula I, wherein R¹ is methoxy and N¹ is a nucleobase. In some embodiments, X³ has the structure of Formula I, wherein R¹ is methoxy and N¹ is a nucleobase.

[0030] In some embodiments, at least one of X¹, X², and X³ has the structure of Formula II, wherein R² is hydrogen and N¹ is a nucleobase. In some embodiments, X² has the structure of Formula II, wherein R² is hydrogen and N¹ is a nucleobase.

[0031] In other embodiments, at least one of X¹ and X² has the structure of Formula V. In some embodiments, X² has the structure of Formula V, wherein R⁴ is hydrogen and R⁵ is hydrogen.

[0032] In other embodiments, X² has the structure of Formula V, wherein R⁴ is hydrogen and R⁵ is hydroxy. In some embodiments, X¹ has the structure of Formula V, wherein R⁴ is hydrogen and R⁵ is hydrogen. In other embodiments, X¹ has the structure of Formula V, wherein R⁴ is hydrogen and R⁵ is hydroxy. In some embodiments, X² has the structure of Formula V, wherein R⁴ is hydrogen and R⁵ is methoxy.

[0033] In some embodiments, when X¹ has the structure of any one of Formulas I to V, each of X² and X³ is, independently, a ribonucleotide, a 2′-O—C₁-C₆ alkyl-nucleotide, a 2′-amino-nucleotide, an arabinonucleic acid-nucleotide, a bicyclic-nucleotide, a 2′-F-nucleotide, 2′-O-methoxyethyl-nucleotide, a constrained ethyl-nucleotide, a LNA-nucleotide, or a DNA-nucleotide; when X² has the structure of any one of Formulas I to V, each of X¹ and X³ is, independently, a ribonucleotide, a 2′-O—C₁-C₆ alkyl-nucleotide, a 2′-amino-nucleotide, an arabinonucleic acid-nucleotide, a bicyclic-nucleotide, a 2′-F-nucleotide, 2′-O-methoxyethyl-nucleotide, a constrained ethyl-nucleotide, a LNA-nucleotide, or a DNA-nucleotide; when X³ has the structure of any one of Formulas I to V, each of X¹ and X² is, independently, a ribonucleotide, a 2′-O—C₁-C₆ alkyl-nucleotide, a 2′-amino-nucleotide, an arabinonucleic acid-nucleotide, a bicyclic-nucleotide, a 2′-F-nucleotide, 2′-O-methoxyethyl-nucleotide, a constrained ethyl-nucleotide, a LNA-nucleotide, or a DNA-nucleotide; when X¹ and X² each have the structure of any one of Formulas I to V, X³ is a ribonucleotide, a 2′-O—C₁-C₆ alkyl-nucleotide, a 2′-amino-nucleotide, an arabinonucleic acid-nucleotide, a bicyclic-nucleotide, a 2′-F-nucleotide, 2′-O-methoxyethyl-nucleotide, a constrained ethyl-nucleotide, a LNA-nucleotide, or a DNA-nucleotide; when X¹ and X³ each have the structure of any one of Formulas I to V, X² is a ribonucleotide, a 2′-O—C₁-C₆ alkyl-nucleotide, a 2′-amino-nucleotide, an arabinonucleic acid-nucleotide, a bicyclic-nucleotide, a 2′-F-nucleotide, 2′-O-methoxyethyl-nucleotide, a constrained ethyl-nucleotide, a LNA-nucleotide, or a DNA-nucleotide; and when X² and X³ each have the structure of any one of Formulas I to V, X¹ is a ribonucleotide, a 2′-O—C₁-C₆ alkyl-nucleotide, a 2′-amino-nucleotide, an arabinonucleic acid-nucleotide, a bicyclic-nucleotide, a 2′-F-nucleotide, 2′-O-methoxyethyl-nucleotide, a constrained ethyl-nucleotide, a LNA-nucleotide, or a DNA-nucleotide.

[0034] In other embodiments, when X¹ has the structure of any one of Formulas I to V, each of X² and X³ is, independently, a ribonucleotide, a 2′-F-nucleotide, 2′-O-methoxyethyl-nucleotide, or a DNA-nucleotide; when X² has the structure of any one of Formulas I to V, each of X¹ and X³ is, independently, a ribonucleotide, a 2′-F-nucleotide, 2′-O-methoxyethyl-nucleotide, or a DNA-nucleotide; when X³ has the structure of any one of Formulas I to V, each of X¹ and X² is, independently, a ribonucleotide, a 2′-F-nucleotide, 2′-O-methoxyethyl-nucleotide, or a DNA-nucleotide; when X¹ and X² each have the structure of any one of Formulas I to V, X³ is a ribonucleotide, a 2′-F-nucleotide, 2′-O-methoxyethyl-nucleotide, or a DNA-nucleotide; when X¹ and X³ each have the structure of any one of Formulas I to V, X² is a ribonucleotide, a 2′-F-nucleotide, 2′-O-methoxyethyl-nucleotide, or a DNA-nucleotide; and when X² and X³ each have the structure of any one of Formulas I to V, X¹ is a ribonucleotide, a 2′-F-nucleotide, 2′-O-methoxyethyl-nucleotide, or a DNA-nucleotide.

[0035] In some embodiments, when X¹ has the structure of any one of Formulas I to V, each of X² and X³ is a ribonucleotide; when X² has the structure of any one of Formulas I to V, each of X¹ and X³ is a ribonucleotide; when X³ has the structure of any one of Formulas I to V, each of X¹ and X² is a ribonucleotide; when X¹ and X² each have the structure of any one of Formulas I to V, X³ is a ribonucleotide; when X¹ and X³ each have the structure of any one of Formulas I to V, X² is a ribonucleotide; and when X² and X³ each have the structure of any one of Formulas I to V, X¹ is a ribonucleotide.

[0036] In some embodiments, none of X¹, X², and X³ has the structure of Formula II, wherein N¹ is a nucleobase. In other embodiments, none of X¹, X², and X³ has the structure of Formula II, wherein N¹ is a cytosine nucleobase.

[0037] In some embodiments, X¹ comprises a uracil or thymine nucleobase. In other embodiments, X¹ comprises a uracil nucleobase. In some embodiments, X¹ comprises a hypoxanthine nucleobase. In other embodiments, X¹ comprises a cytosine nucleobase.

[0038] In some embodiments, X³ comprises a guanine nucleobase. In other embodiments, X³ comprises a hypoxanthine nucleobase. In some embodiments, X³ comprises an adenine nucleobase.

[0039] In some embodiments, X² comprises a cytosine or 5-methylcytosine nucleobase. In other embodiments, X² comprises a cytosine nucleobase. In some embodiments, X² has the structure of any one of Formula I-V. In other embodiments, X² is not a 2′-O-methyl-nucleotide.

[0040] In some embodiments, X¹, X², and X³ are not 2′-O-methyl-nucleotides.

[0041] In some embodiments, the guide oligonucleotide comprises the structure:

[Aₘ]-X¹—X²—X³—[Bₙ]

[0042] wherein each of A and B is a nucleotide; m and n are each, independently, an integer from 1 to 50; X¹, X², and X³ are each, independently, a nucleotide, wherein at least one of X¹, X², or X³ has the structure of any one of Formula VI-XI:

[chemical structure]

wherein N¹ is hydrogen or a nucleobase; R¹² is hydrogen, hydroxy, fluoro, halogen, C₁-C₆ alkyl, C₁-C₆ heteroalkyl, or C₁-C₆ alkoxy; R¹³ is hydrogen or C₁-C₆ alkyl, wherein at least one of X¹, X², or X³ has the structure of any one of Formula VI-IX.

[0043] In some embodiments, at least 80% of the nucleotides of [Aₘ] and/or [Bₙ] include a nucleobase, a sugar, and an internucleoside linkage.

[0044] In some embodiments, R¹² is hydrogen, halogen, C₁-C₆ alkyl, or C₁-C₆ heteroalkyl. In other embodiments, the halogen is fluoro. In some embodiments, R¹² is hydrogen or C₁-C₆ alkyl; In other embodiments, R¹² is hydrogen.

[0045] In some embodiments, at least one of X¹, X², and X³ has the structure of Formula VI, and N¹ is a nucleobase. In other embodiments, X¹ has the structure of Formula VI, and NV is a nucleobase. In some embodiments, X² has the structure of Formula VI, and N¹ is a nucleobase.

[0046] In some embodiments, at least one of X¹, X², and X³ has the structure of Formula VII, and N¹ is a nucleobase. In some embodiments, X¹ has the structure of Formula VII, and N¹ is a nucleobase. In other embodiments, X² has the structure of Formula VII, and N¹ is a nucleobase.

[0047] In some embodiments, at least one of X¹, X², and X³ has the structure of Formula IX, and N¹ is a nucleobase. In some embodiments, X¹ has the structure of Formula IX, and N¹ is a nucleobase. In other embodiments, X² has the structure of Formula IX, and N¹ is a nucleobase.

[0048] In some embodiments, at least one of X¹, X², and X³ has the structure of Formula VIII, and N¹ is a nucleobase. In some embodiments, X¹ has the structure of Formula VIII, and N¹ is a nucleobase. In other embodiments, X² has the structure of Formula VIII, and N¹ is a nucleobase.

[0049] In some embodiments, X² does not have the structure of Formula VI. In other embodiments, X³ does not have the structure of Formula VI. In some embodiments, X² does not have the structure of Formula VII. In other embodiments, X³ does not have the structure of Formula VII. In some embodiments, X² does not have the structure of Formula IX. In other embodiments, X² has the structure of Formula VI or Formula VII.

[0050] In some embodiments, when X¹ has the structure of any one of Formulas VI to XI, each of X² and X³ is, independently, a ribonucleotide, a 2′-O—C₁-C₆ alkyl-nucleotide, a 2′-amino-nucleotide, an arabinonucleic acid-nucleotide, a bicyclic-nucleotide, a 2′-F-nucleotide, 2′-O-methoxyethyl-nucleotide, a constrained ethyl-nucleotide, a LNA-nucleotide, or a DNA-nucleotide; when X² has the structure of any one of Formulas VI to XI, each of X¹ and X³ is, independently, a ribonucleotide, a 2′-O—C₁-C₆ alkyl-nucleotide, a 2′-amino-nucleotide, an arabinonucleic acid-nucleotide, a bicyclic-nucleotide, a 2′-F-nucleotide, 2′-O-methoxyethyl-nucleotide, a constrained ethyl-nucleotide, a LNA-nucleotide, or a DNA-nucleotide; when X³ has the structure of any one of Formulas VI to XI, each of X¹ and X² is, independently, a ribonucleotide, a 2′-O—C₁-C₆ alkyl-nucleotide, a 2′-amino-nucleotide, an arabinonucleic acid-nucleotide, a bicyclic-nucleotide, a 2′-F-nucleotide, 2′-O-methoxyethyl-nucleotide, a constrained ethyl-nucleotide, a LNA-nucleotide, or a DNA-nucleotide; when X¹ and X² each have the structure of any one of Formulas VI to XI, X³ is a ribonucleotide, a 2′-O—C₁-C₆ alkyl-nucleotide, a 2′-amino-nucleotide, an arabinonucleic acid-nucleotide, a bicyclic-nucleotide, a 2′-F-nucleotide, 2′-O-methoxyethyl-nucleotide, a constrained ethyl-nucleotide, a LNA-nucleotide, or a DNA-nucleotide; when X¹ and X³ each have the structure of any one of Formulas VI to XI, X² is a ribonucleotide, a 2′-O—C₁-C₆ alkyl-nucleotide, a 2′-amino-nucleotide, an arabinonucleic acid-nucleotide, a bicyclic-nucleotide, a 2′-F-nucleotide, 2′-O-methoxyethyl-nucleotide, a constrained ethyl-nucleotide, a LNA-nucleotide, or a DNA-nucleotide; and when X² and X³ each have the structure of any one of Formulas VI to XI, X¹ is a ribonucleotide, a 2′-O—C₁-C₆ alkyl-nucleotide, a 2′-amino-nucleotide, an arabinonucleic acid-nucleotide, a bicyclic-nucleotide, a 2′-F-nucleotide, 2′-O-methoxyethyl-nucleotide, a constrained ethyl-nucleotide, a LNA-nucleotide, or a DNA-nucleotide.

[0051] In other embodiments, when X¹ has the structure of any one of Formulas VI to XI, each of X² and X³ is, independently, a ribonucleotide, a 2′-F-nucleotide, 2′-O-methoxyethyl-nucleotide, or a DNA-nucleotide; when X² has the structure of any one of Formulas VI to XI, each of X¹ and X³ is, independently, a ribonucleotide, a 2′-F-nucleotide, 2′-O-methoxyethyl-nucleotide, or a DNA-nucleotide; when X³ has the structure of any one of Formulas VI to XI, each of X¹ and X² is, independently, a ribonucleotide, a 2′-F-nucleotide, 2′-O-methoxyethyl-nucleotide, or a DNA-nucleotide; when X¹ and X² each have the structure of any one of Formulas VI to XI, X³ is a ribonucleotide, a 2′-F-nucleotide, 2′-O-methoxyethyl-nucleotide, or a DNA-nucleotide; when X¹ and X³ each have the structure of any one of Formulas VI to XI, X² is a ribonucleotide, a 2′-F-nucleotide, 2′-O-methoxyethyl-nucleotide, or a DNA-nucleotide; and when X² and X³ each have the structure of any one of Formulas VI to XI, X¹ is a ribonucleotide, a 2′-F-nucleotide, 2′-O-methoxyethyl-nucleotide, or a DNA-nucleotide.

[0052] In some embodiments, when X¹ has the structure of any one of Formulas VI to XI, each of X² and X³ is a ribonucleotide; when X² has the structure of any one of Formulas VI to XI, each of X¹ and X³ is a ribonucleotide; when X³ has the structure of any one of Formulas VI to XI, each of X¹ and X² is a ribonucleotide; when X¹ and X² each have the structure of any one of Formulas VI to XI, X³ is a ribonucleotide; when X¹ and X³ each have the structure of any one of Formulas VI to XI, X² is a ribonucleotide; and when X² and X³ each have the structure of any one of Formulas VI to XI, X¹ is a ribonucleotide.

[0053] In some embodiments, X¹ comprises a hypoxanthine nucleobase. In other embodiments, X¹ comprises a uracil nucleobase. In some embodiments, X¹ comprises a cytosine nucleobase. In other embodiments, X³ comprises a hypoxanthine nucleobase. In some embodiments, X³ comprises a guanine nucleobase. In other embodiments, X³ comprises a adenine nucleobase. In some embodiments, X² comprises a cytosine nucleobase. In other embodiments, X² comprises a uracil nucleobase. In some embodiments, X² does not include a nucleobase. In other embodiments, X² is not a 2′-O-methyl-nucleotide. In some embodiments, X¹, X², and X³ are not 2′-O-methyl-nucleotides.

[0054] In some embodiments, the guide oligonucleotide comprises the structure:

[Aₘ]-X¹—X²—X³—[Bₙ]

[0055] wherein each of A and B is a nucleotide; m and n are each, independently, an integer from 1 to 50; X¹, X², and X³ are each, independently, a nucleotide, wherein at least one of X¹, X², and X³ has the structure of any one of Formula XII-XV:

[chemical structure]

[0056] wherein N¹ is hydrogen or a nucleobase; R⁶ is hydrogen, hydroxy, or halogen; R⁷ is hydrogen, hydroxy, halogen, or C₁-C₆ alkoxy; R⁸ is hydrogen or halogen; R⁹ is hydrogen or hydroxy, halogen, or C₁-C₆ alkoxy; R¹⁰ Is hydrogen or halogen; and R¹¹ is hydrogen or hydroxy, halogen, or C₁-C₆ alkoxy.

[0057] In some embodiments, at least 80% of the nucleotides of [Aₘ] and/or [Bₙ] include a nucleobase, a sugar, and an internucleoside linkage.

[0058] In some embodiments, halogen is fluoro.

[0059] In some embodiments, C₁-C₆ alkoxy is OCH₃.

[0060] In some embodiments, at least one of X¹, X², and X³ has the structure of Formula XIII, in which each of R⁸ and R⁹ is hydrogen. In some embodiments, X¹ has the structure of Formula XIII, in which each of R⁸ and R⁹ is hydrogen. In other embodiments, X² has the structure of Formula XIII, in which each of R⁸ and R⁹ is hydrogen. In some embodiments, X² has the structure of any one of Formula XII-XV.

[0061] In some embodiments, when X¹ has the structure of any one of Formulas XII-XV, each of X² and X³ is, independently, a ribonucleotide, a 2′-O—C₁-C₆ alkyl-nucleotide, a 2′-amino-nucleotide, an arabinonucleic acid-nucleotide, a bicyclic-nucleotide, a 2′-F-nucleotide, 2′-O-methoxyethyl-nucleotide, a constrained ethyl-nucleotide, a LNA-nucleotide, or a DNA-nucleotide; when X² has the structure of any one of Formulas XII-XV, each of X¹ and X³ is, independently, a ribonucleotide, a 2′-O—C₁-C₆ alkyl-nucleotide, a 2′-amino-nucleotide, an arabinonucleic acid-nucleotide, a bicyclic-nucleotide, a 2′-F-nucleotide, 2′-O-methoxyethyl-nucleotide, a constrained ethyl-nucleotide, a LNA-nucleotide, or a DNA-nucleotide; when X³ has the structure of any one of Formulas XII-XV, each of X¹ and X² is, independently, a ribonucleotide, a 2′-O—C₁-C₆ alkyl-nucleotide, a 2′-amino-nucleotide, an arabinonucleic acid-nucleotide, a bicyclic-nucleotide, a 2′-F-nucleotide, 2′-O-methoxyethyl-nucleotide, a constrained ethyl-nucleotide, a LNA-nucleotide, or a DNA-nucleotide; when X¹ and X² each have the structure of any one of Formulas XII-XV, X³ is a ribonucleotide, a 2′-O—C₁-C₆ alkyl-nucleotide, a 2′-amino-nucleotide, an arabinonucleic acid-nucleotide, a bicyclic-nucleotide, a 2′-F-nucleotide, 2′-O-methoxyethyl-nucleotide, a constrained ethyl-nucleotide, a LNA-nucleotide, or a DNA-nucleotide; when X¹ and X³ each have the structure of any one of Formulas XII-XV, X² is a ribonucleotide, a 2′-O—C₁-C₆ alkyl-nucleotide, a 2′-amino-nucleotide, an arabinonucleic acid-nucleotide, a bicyclic-nucleotide, a 2′-F-nucleotide, 2′-O-methoxyethyl-nucleotide, a constrained ethyl-nucleotide, a LNA-nucleotide, or a DNA-nucleotide; and when X² and X³ each have the structure of any one of Formulas XII-XV, X¹ is a ribonucleotide, a 2′-O—C₁-C₆ alkyl-nucleotide, a 2′-amino-nucleotide, an arabinonucleic acid-nucleotide, a bicyclic-nucleotide, a 2′-F-nucleotide, 2′-O-methoxyethyl-nucleotide, a constrained ethyl-nucleotide, a LNA-nucleotide, or a DNA-nucleotide.

[0062] In other embodiments, when X¹ has the structure of any one of Formulas XII-XV, each of X² and X³ is, independently, a ribonucleotide, a 2′-F-nucleotide, 2′-O-methoxyethyl-nucleotide, or a DNA-nucleotide; when X² has the structure of any one of Formulas XII-XV, each of X¹ and X³ is, independently, a ribonucleotide, a 2′-F-nucleotide, 2′-O-methoxyethyl-nucleotide, or a DNA-nucleotide; when X³ has the structure of any one of Formulas XII-XV, each of X¹ and X² is, independently, a ribonucleotide, a 2′-F-nucleotide, 2′-O-methoxyethyl-nucleotide, or a DNA-nucleotide; when X¹ and X² each have the structure of any one of Formulas XII-XV, X³ is a ribonucleotide, a 2′-F-nucleotide, 2′-O-methoxyethyl-nucleotide, or a DNA-nucleotide; when X¹ and X³ each have the structure of any one of Formulas XII-XV, X² is a ribonucleotide, a 2′-F-nucleotide, 2′-O-methoxyethyl-nucleotide, or a DNA-nucleotide; and when X² and X³ each have the structure of any one of Formulas XII-XV, X¹ is a ribonucleotide, a 2′-F-nucleotide, 2′-O-methoxyethyl-nucleotide, or a DNA-nucleotide.

[0063] In some embodiments, when X¹ has the structure of any one of Formulas XII-XV, each of X² and X³ is a ribonucleotide; when X² has the structure of any one of Formulas XII-XV, each of X¹ and X³ is a ribonucleotide; when X³ has the structure of any one of Formulas XII-XV, each of X¹ and X² is a ribonucleotide; when X¹ and X² each have the structure of any one of Formulas XII-XV, X³ is a ribonucleotide; when X¹ and X³ each have the structure of any one of Formulas XII-XV, X² is a ribonucleotide; and when X² and X³ each have the structure of any one of Formulas XII-XV, X¹ is a ribonucleotide.

[0064] In some embodiments, X¹ includes a hypoxanthine nucleobase. In other embodiments, X¹ includes a uracil nucleobase. In some embodiments, X¹ includes a cytosine nucleobase. In other embodiments, X³ includes a hypoxanthine nucleobase. In some embodiments, X³ includes an adenine nucleobase. In other embodiments, X² includes a cytosine nucleobase. In some embodiments, X² includes a uracil nucleobase. In other embodiments, X² does not include a nucleobase. In some embodiments, X² is not a 2′-O-methyl-nucleotide. In other embodiments, X¹, X², and X³ are not 2′-O-methyl-nucleotides.

[0065] In some embodiments, [Aₘ] comprises at least one nuclease resistant nucleotide. In other embodiments, [Aₘ] comprises at least one 2′-O—C₁-C₆ alkyl-nucleotide, at least one 2′-amino-nucleotide, at least one arabino nucleic acid-nucleotide, at least one bicyclic-nucleotide, at least one 2′-F-nucleotide, at least one 2′-O-methoxyethyl-nucleotide, at least one constrained ethyl (cEt)-nucleotide, at least one LNA-nucleotide, and/or at least one DNA-nucleotide.

[0066] In some embodiments, [Aₘ] comprises at least one 2′-O-methyl-nucleotide, at least one 2′-F-nucleotide, at least one 2′-O-methoxyethyl-nucleotide, at least one cEt-nucleotide, at least one LNA-nucleotide, and/or at least one DNA-nucleotide. In other embodiments, [Aₘ] comprises at least five terminal 2′-O-methyl-nucleotides. In some embodiments, [Aₘ] comprises at least one phosphorothioate linkage. In other embodiments, [Aₘ] comprises at least four terminal phosphorothioate linkages. In some embodiments, at least one phosphorothioate linkage is stereopure.

[0067] In some embodiments, [Bₙ] comprises at least one nuclease resistant nucleotide. In other embodiments, [Bₙ] comprises at least one at least one 2′-O—C₁-C₆ alkyl-nucleotide, at least one 2′-amino-nucleotide, at least one arabino nucleic acid-nucleotide, at least one bicyclic-nucleotide, at least one 2′-F-nucleotide, at least one 2′-O-methoxyethyl-nucleotide, at least one cEt-nucleotide, at least one LNA-nucleotide, and/or at least one DNA-nucleotide.

[0068] In some embodiments, [Bₙ] comprises at least one 2′-O-methyl-nucleotide, at least one 2′-F-nucleotide, at least one 2′-O-methoxyethyl-nucleotide, at least one cEt-nucleotide, at least one LNA-nucleotide, and/or at least one DNA-nucleotide. In other embodiments, [Bₙ] comprises at least five terminal 2′-O-methyl-nucleotides. In some embodiments, [Bₙ] comprises at least one phosphorothioate linkage. In other embodiments, [B₁] comprises at least four terminal phosphorothioate linkages. In some embodiments, at least one phosphorothioate linkage is stereopure.

[0069] In some embodiments, at least 20% of the nucleotides of [Aₘ] and [Bₙ] combined are 2′-O-methyl-nucleotides.

[0070] In some embodiments, the oligonucleotide further comprises a 5′-cap structure. In other embodiments, the oligonucleotide comprises at least one alternative nucleobase. In some embodiments, the 5′-terminal nucleotide is a 2′-amino-nucleotide.

[0071] In other embodiments, A and B combined consist of 18 to 80 nucleotides. In some embodiments, m is 5 to 40. In other embodiments, n is 5 to 40.

[0072] In some embodiments, m and n are each, independently, an integer from 5 to 40; at least one of X¹, X², and X³ has the structure of Formula I, wherein R¹ is fluoro, hydroxy, or methoxy and N¹ is a nucleobase, or the structure of Formula V, wherein R⁴ is hydrogen and R⁵ is hydrogen; each of X¹, X², and X³ that does not have the structure of Formula I or Formula V is a ribonucleotide; [Aₘ] and [Bₙ] each comprise at least five terminal 2′-O-methyl-nucleotides and at least four terminal phosphorothioate linkages; and at least 20% of the nucleotides of [Aₘ] and [Bₙ] combined are 2′-O-methyl-nucleotides.

[0073] In other embodiments, m and n are each, independently, an integer from 5 to 40; at least one of X¹, X², and X³ has the structure of Formula VI, Formula VII, Formula VIII, or Formula IX, wherein N¹ is a nucleobase and each of X¹, X², and X³ that does not have the structure of Formula VI, Formula VII, Formula VIII, or Formula IX is a ribonucleotide; [Aₘ] and [Bₙ] each include at least five terminal 2′-O-methyl-nucleotides and at least four terminal phosphorothioate linkages; and at least 20% of the nucleotides of [Aₘ] and [Bₙ] combined are 2′-O-methyl-nucleotides.

[0074] In some embodiments, m and n are each, independently, an integer from 5 to 40; at least of X¹, X², and X³ has the structure of Formula XIII, wherein R⁸ and R⁹ are each hydrogen, and each of X¹, X² and X³ that does not have the structure of Formula XII is a ribonucleotide; [Aₘ] and [Bₙ] each include at least five terminal 2′-O-methyl-nucleotides and at least four terminal phosphorothioate linkages; and at least 20% of the nucleotides of [Aₘ] and [B₁] combined are 2′-O-methyl-nucleotides.

### DETAILED DESCRIPTION OF THE INVENTION

[0075] The present invention provides methods of editing an LRRK2 polynucleotide, e.g., an LRRK2 polynucleotide comprising a single nucleotide polymorphism (SNP) associated with Parkinson's Disease (PD), and methods for treating or preventing an LRRK2-associated disease, e.g., Parkinson's Disease, in a subject using a guide oligonucleotide capable of effecting an adenosine deaminase acting on RNA (ADAR)-mediated adenosine to inosine alteration in the target gene, e.g., an ADAR-mediated adenosine to inosine alternation of the SNP associated with Parkinson's Disease.

[0076] The present invention provides methods for site specific editing of LRRK2 in a cell, without the need to transduce or transfect the cell with genetically engineered editing enzymes. The design of the guide oligonucleotides of the present invention allows the recruitment of the ADAR enzyme, to the specific editing sites disclosed herein. The methods of the present invention can conveniently be used to make changes in LRRK2, for example to reverse mutations that are involved in, or cause, LRRK2-associated disease, thereby alleviating the symptoms of the disease. This is of great advantage when used in treating the LRRK2-associated disease, e.g., Parkinson's Disease. Further, the guide oligonucleotides used in the methods of the present invention provide an ease of delivery and avoid any immune response, e.g., associated with viral vectors. Editing of the existing mutant gene preserves the endogenous transcriptional control of the gene including cell type specificity, control by exogenous stimuli, and splice variation, that is not preserved by expression of the gene by an introduced vector.

[0077] The following detailed description discloses methods for editing an LRRK2 polynucleotide using a guide oligonucleotide capable of effecting an ADAR-mediated adenosine to inosine alteration, how to make and use compositions containing the guide oligonucleotides capable of effecting an ADAR-mediated adenosine to inosine alteration, as well as compositions, uses, and methods for treating subjects having an LRRK2-associated disease that would benefit from editing the sequence of an LRRK2 gene.

### I. Definitions

[0078] In order that the present invention may be more readily understood, certain terms are first defined. In addition, it should be noted that whenever a value or range of values of a parameter are recited, it is intended that values and ranges intermediate to the recited values are also intended to be part of this invention.

[0079] The articles “a” and “an” are used herein to refer to one or to more than one (i.e., to at least one) of the grammatical object of the article. By way of example, “an element” means one element or more than one element, e.g., a plurality of elements.

[0080] The term “including” is used herein to mean, and is used interchangeably with, the phrase “including, but not limited to”.

[0081] The term “or” is used herein to mean, and is used interchangeably with, the term “and/or,” unless context clearly indicates otherwise.

[0082] The term “about” is used herein to mean within the typical ranges of tolerances in the art, e.g., acceptable variation in time between doses, acceptable variation in dosage unit amount. For example, “about” can be understood as within about 2 standard deviations from the mean. In certain embodiments, about means +10%. In certain embodiments, about means +5%. When about is present before a series of numbers or a range, it is understood that “about” can modify each of the numbers in the series or range.

[0083] The term “at least” prior to a number or series of numbers is understood to include the number adjacent to the term “at least”, and all subsequent numbers or integers that could logically be included, as clear from context. For example, the number of nucleotides in a nucleic acid molecule must be an integer. For example, “at least 18 nucleotides of a 21-nucleotide nucleic acid molecule” means that 18, 19, 20, or 21 nucleotides have the indicated property. When at least is present before a series of numbers or a range, it is understood that “at least” can modify each of the numbers in the series or range.

[0084] As used herein, “central triplet” or the “triplet” is understood as the three nucleotides opposite the target adenosine in the target RNA, wherein the middle nucleotide in the central triplet is directly opposite the target adenosine. The central triplet does not have to be in the middle (in the center) of the guide oligonucleotide, it may be located more to the 3′ as well as to the 5′ end of the guide oligonucleotide, whatever is preferred for a certain target. Central in this aspect has therefore more the meaning of the triplet that is in the center of catalytic activity when it comes to chemical modifications and targeting the target adenosine. It should also be noted that the guide oligonucleotides are sometimes depicted from 3′ to 5′, especially when the target sequence is shown from 5′ to 3′. However, whenever herein the order of nucleotides within the guide oligonucleotide is discussed it is always from 5′ to 3′ of the guide oligonucleotide. The position can also be expressed in terms of a particular nucleotide within the guide oligonucleotide while still adhering to the 5′ to 3′ directionality, in which case other nucleotides 5′ of the said nucleotide are marked as negative positions and those 3′ of it as positive positions. For example, the C in the Central triplet is the nucleotide (at the 0 position) opposite the targeted adenosine and the U would in this case be the −1 nucleotide and the G would then be the +1 nucleotide, etc.

[0085] As used herein, “no more than” or “less than” is understood as the value adjacent to the phrase and logical lower values or integers, as logical from context, to zero. For example, an oligonucleotide with “no more than 5 unmodified nucleotides” has 5, 4, 3, 2, 1, or 0 unmodified nucleotides. When “no more than” is present before a series of numbers or a range, it is understood that “no more than” can modify each of the numbers in the series or range.

[0086] As used herein, a “leucine rich repeat kinase 2” or “LRRK2” refers to the well-known gene and protein. LRRK2 is also known as dardarin, Parkinson Disease (Autosomal dominant)8, PARK8, AURA17, RIPK7, and ROCO2. LRRK2 is a large multidomain protein kinase. It is classified as a member of the ROCO superfamily which is characterized by the presence of tandem Ras of complex (Roc) G-domain, kinase domains and carboxy-terminal of Roc (COR) sequence which links them. In addition, LRRK2 contains multiple protein-protein interaction domains such as armadillo (ARM), ankyrin (ANK), leucine-rich repeats (LRR) in the N-terminal region and the WD40 domains at the C-terminus. The physiological functions of LRRK2 can be demonstrated from its two distinct enzymatic domains: the kinase domain could catalyze phosphorylation and the ROC-GTPase domain is involved in GTP-GDP hydrolysis. Several mutations in LRRK2, for example, R1441G, R1441C, R1441H, Y1699C, G2019S, 12020T, and N1437H, have been demonstrated to be pathogenic and are associated with the late-onset of Parkinson's Disease (PD) (J Li. et al. Molecular Neurodegeneration 2014, 9: 47). The most common mutation of LRRK2 gene is G2019S, accounting for 5-6% of familial PD, and in 1-2% of sporadic cases of PD (Bardien S, et al., Parkinsonism Relat Disord. 2011, 17: 501-508). People carrying one copy of mutated LRRK2 have a 30% chance of developing PD, which increases sharply with age. Non-familial PD patients also often carry a mutation that arose de novo.

[0087] The sequence of a human LRRK2 mRNA transcript can be found at National Center for Biotechnology Information (NCBI) RefSeq accession number NM_198578.4 (see also, SEQ ID NO: 57 provided herewith). Additional examples of LRRK2 mRNA sequences are readily available using publicly available databases, e.g., GenBank, UniProt, and OMIM.

[0088] An “LRRK2-associated disease,” as used herein, is intended to include any disease associated with the LRRK2 gene or protein. Such a disease may be caused, for example, by LRRK2 gene mutations, by excess production of the LRRK2 protein, by abnormal cleavage of the LRRK2 protein, by abnormal interactions between LRRK2 and other proteins or other endogenous or exogenous substances. In some embodiments, the “LRRK2-associated disease” is Parkinson's Disease. Clinical symptoms of Parkinson's Disease include akinesia, resting tremor, muscle rigidity, and postural imbalance. In the early stages of the disease, there may be only slight disturbances of posture, locomotion, facial expressions, or speech. Later on, movement difficulty may progress to complete lack of mobility. Symptoms may initially manifest as asymmetric, however as the disease progresses, the symptoms become bilateral and progressively debilitating. PD patients also commonly experience dementia, ataxia, dysphasia, cognitive loss and mood disorders, and the quality and life expectancy of patients with PD is substantially reduced. The neuropathological hallmarks are characterized by a progressive loss of dopaminergic neurons in the substantia nigra pars compacta and the presence of proteinaceous inclusions immunoreactive for α-synuclein termed as Lewy bodies and dystrophic Lewy neurites in surviving neurons.

[0089] As used herein, the term “single nucleotide polymorphisms (SNP),” refers to a variation at a single position in a DNA sequence among individuals. If more than 1% of a population does not carry the same nucleotide at a specific position in the DNA sequence, then this variation can be classified as an SNP. If an SNP occurs within a gene, then the gene is described as having more than one allele. In these cases, SNPs may lead to variations in the amino acid sequence. For example, at a specific base position in the human genome, the C nucleotide can appear in most individuals, but in a minority of individuals, the position is occupied by an A. This means that there is an SNP at this specific position, and the two possible nucleotide variations, C or A, are the two alleles for this position.

[0090] SNPs can fall within coding regions of genes, non-coding regions of genes, or in the intergenic regions (regions between genes). In some embodiments, SNPs within a coding sequence do not necessarily change the amino acid sequence of the protein that is produced, due to degeneracy of the genetic code. SNPs in the coding region are of two types: synonymous and nonsynonymous SNPs. Synonymous SNPs do not affect the protein sequence, while nonsynonymous SNPs change the amino acid sequence of protein. The nonsynonymous SNPs are of two types: missense and nonsense. SNPs that are not in protein-coding regions can still affect gene splicing, transcription factor binding, messenger RNA degradation, or the sequence of noncoding RNA. Gene expression affected by this type of SNP is referred to as an eSNP (expression SNP) and can be upstream or downstream from the gene. A single nucleotide variant is a variation in a single nucleotide without any limitations of frequency and can arise in somatic cells. A somatic single nucleotide variation can also be called a single-nucleotide alteration.

[0091] Although a particular SNP may not cause a disorder, some SNPs are associated with certain diseases. These associations allow for the use of specific SNPs to evaluate an individual's genetic predisposition to develop a disease. In addition, if certain SNPs are known to be associated with a trait, then examination of certain stretches of DNA near these SNPs will help identify the gene or genes responsible for the trait.

[0092] As used herein, the phrase “SNP associated with Parkinson's Disease” refers to any SNPs that are associated with the onset or development of Parkinson's Disease. Exemplary SNPs associated with PD may include, but are not limited to, any single nucleotide changes in the LRRK2 polynucleotide resulting in a pathogenic amino acid at positions 1441, 1699, 2019, 2020 and 1437 of the LRRK2 protein. In some embodiments, the SNP associated with PD is rs34637584, an SNP commonly referred to as the G2019S variant (or mutation) based on the potential change from glycine (encoded by rs34637584(G) allele) to serine (encoded by the rs34637584(A) allele) at position 2019 of the LRRK2 protein. In some embodiments, the SNP associated with PD is rs34995376, an SNP commonly referred to as the R1441H variant (or mutation) based on the potential change from glycine (encoded by rs34995376(G) allele) to serine (encoded by the rs34995376(A) allele) at position 1441 of the LRRK2 protein.

[0093] The term “pathogenic amino acid” refers to any amino acid that is not a wild-type amino acid in a protein and which leads to a pathogenesis.

[0094] The terms “pathogenic mutation”, “pathogenic variant”, “disease causing mutation”, “disease causing variant”, or “deleterious mutation”, refers to a genetic alteration or mutation that increases an individual's susceptibility or predisposition to a certain disease or disorder. In some embodiments, the pathogenic mutation comprises at least one wild-type amino acid substituted by at least one pathogenic amino acid in a protein encoded by a gene. In some embodiments, the pathogenic mutation comprises a missense mutation. In some embodiments, the pathogenic mutation comprises a splice site mutation, e.g., a splice donor variant, or a splice acceptor variant. In some embodiments, the pathogenic mutation comprises a nonsense mutation. In some embodiments, the pathogenic mutation comprises at least one wild-type allele substituted by at least one pathogenic allele in the target gene.

[0095] As used herein, a “premature stop codon” refers to the appearance of a stop codon where there should be a codon corresponding to an amino acid.

[0096] The term “adenosine deaminase”, as used herein, refers to a polypeptide or fragment thereof capable of catalyzing the hydrolytic deamination of adenine or adenosine. In some embodiments, the deaminase or deaminase domain is an adenosine deaminase catalyzing the hydrolytic deamination of adenosine to inosine or deoxy adenosine to deoxyinosine. In some embodiments, the adenosine deaminase catalyzes the hydrolytic deamination of adenine or adenosine in deoxyribonucleic acid (DNA). In some embodiments, the adenosine deaminase catalyzes the hydrolytic deamination of adenine or adenosine in ribonucleic acid (RNA). The adenosine deaminases may be from any organism, such as a human, chimpanzee, gorilla, monkey, cow, dog, rat, or mouse. In some embodiments, the adenosine deaminase is from a bacterium, such as E. coli, S. aureus, S. typhi, S. putrefaciens, H. influenzae, or C. crescentus. In some embodiments, the deaminase or deaminase domain is a variant of a naturally occurring deaminase from an organism, such as a human, chimpanzee, gorilla, monkey, cow, dog, rat, or mouse. In some embodiments, the deaminase or deaminase domain does not occur in nature. For example, in some embodiments, the deaminase or deaminase domain is at least 50%, at least 55%, at least 60%, at least 65%, at least 70%, at least 75% at least 80%, at least 85%, at least 90%, at least 91%, at least 92%, at least 93%, at least 94%, at least 95%, at least 96%, at least 97%, at least 98%, at least 99%, at least 99.1%, at least 99.2%, at least 99.3%, at least 99.4%, at least 99.5%, at least 99.6%, at least 99.7%, at least 99.8%, or at least 99.9% identical to a naturally occurring deaminase. For example, deaminase domains are described in International PCT Application Nos. PCT/2017/045381 (WO 2018/027078) and PCT/US2016/058344 (WO 2017/070632), each of which is incorporated herein by reference for its entirety. Also see Komor, A. C., et al., Nature 533, 420-424 (2016); Gaudelli, N. M., et al., Nature 551, 464-471 (2017); Komor, A. C., et al., Science Advances 3:eaao4774 (2017), and Rees, H. A., et al., Nat Rev Genet. 2018; 19(12):770-788. doi: 10.1038/s41576-018-0059-1, the entire contents of which are hereby incorporated by reference.

[0097] As used herein, the term “Adenosine deaminases acting on RNA (ADAR)” refers to editing enzymes which can recognize certain structural motifs of double-stranded RNA (dsRNA), bind to dsRNA and convert adenosine to inosine through deamination, resulting in recoding of amino acid codons that may lead to changes to the encoded protein and its function. The nucleobases surrounding the editing site, especially the one immediately 5′ of the editing site and one immediately 3′ to the editing site, which together with the editing site are termed the triplet, play an important role in the deamination of adenosine. A preference for U at the 5′ position and G at the 3′ position relative to the editing site, was revealed from the analysis of yeast RNAs efficiently edited by overexpressed human ADAR2 and ADAR1. (See Wang et al., (2018) Biochemistry, 57: 1640-1651; Eifler et al., (2013) Biochemistry, 52: 7857-7869, and Eggington et al., (2011) Nat. Commun., 319: 1-9.) There are three known ADAR proteins expressed in humans, ADAR1, ADAR2, and ADAR3. ADAR1 and ADAR2 are expressed throughout the body, although the level of expression varies across tissues. ADAR3 is expressed only in the brain. For tissues where ADAR1 is expressed, both the p110 and p150 isoforms are expressed. However, the p150 isoform of ADAR1 is only expressed in certain conditions, for example, in response to interferon stimulation. In contrast, expression of ADAR2 is more restricted. ADAR2 is predominantly expressed in the central nervous system, however, its expression is also observed in other tissues, such as the liver. ADAR1 and ADAR2 are catalytically active, while ADAR3 is thought to be inactive. Recruiting ADAR to specific sites of selected transcripts and deamination of adenosine regardless of neighboring bases holds great promise for the treatment of disease.

[0098] As used herein, the term “ADAR-recruiting domain” refers to nucleotide sequences that may be part of the oligonucleotides of the instant invention and which are able to recruit an ADAR enzyme. For example, such recruiting domains may form stem-loop structures that act as recruitment and binding regions for the ADAR enzyme. Oligonucleotides including such ADAR-recruiting domains may be referred to as “axiomer AONs” or “self-looping AONs.” The ADAR-recruiting domain portion may act to recruit an endogenous ADAR enzyme present in the cell. Such ADAR-recruiting domains do not require conjugated entities or presence of modified recombinant ADAR enzymes. Alternatively, the ADAR-recruiting portion may act to recruit a recombinant ADAR fusion protein that has been delivered to a cell or to a subject via an expression vector construct including a polynucleotide encoding an ADAR fusion protein. Such ADAR-fusion proteins may include the deaminase domain of ADAR1 or ADAR2 enzymes fused to another protein, e.g., to the MS2 bacteriophage coat protein. An ADAR-recruiting domain may be a nucleotide sequence based on a natural substrate (e.g., the GluR2 receptor pre-mRNA; such as a GluR2 ADAR-recruiting domain), a Z-DNA structure, or a domain known to recruit another protein which is part of an ADAR fusion protein, e.g., an MS2 ADAR-recruiting domain known to be recognized by the dsRNA binding regions of ADAR. A stem-loop structure of an ADAR-recruiting domain can be an intermolecular stem-loop structure, formed by two separate nucleic acid strands, or an intramolecular stem loop structure, formed within a single nucleic acid strand.

[0099] As used herein, the term “Z-DNA” refers to a left-handed conformation of the DNA double helix or RNA stem loop structures. Such DNA or dsRNA helices wind to the left in a zigzag pattern (as opposed to the right, like the more commonly found B-DNA form). Z-DNA is a known high-affinity ADAR binding substrate and has been shown to bind to human ADAR1 enzyme.

[0100] “G,” “C,” “A,” “T,” and “U” each generally stand for a naturally-occurring nucleotide that contains guanine, cytosine, adenine, thymidine, and uracil as a base, respectively. However, it will be understood that the term “nucleotide” can also refer to an alternative nucleotide, as further detailed below, or a surrogate replacement moiety. The skilled person is well aware that guanine, cytosine, adenine, and uracil can be replaced by other moieties without substantially altering the base pairing properties of an oligonucleotide including a nucleotide bearing such replacement moiety. For example, without limitation, a nucleotide including hypoxanthine as its base can base pair with nucleotides containing adenine, cytosine, or uracil. Hence, nucleotides containing uracil, guanine, or adenine can be replaced in the nucleotide sequences of oligonucleotides featured in the invention by a nucleotide containing, for example, hypoxanthine. In another example, adenine and cytosine anywhere in the oligonucleotide can be replaced with guanine and uracil, respectively to form G-U wobble base pairing with the target mRNA. Sequences containing such replacement moieties are suitable for the compositions and methods featured in the invention.

[0101] The terms “nucleobase” and “base” include the purine (e.g., adenine and guanine) and pyrimidine (e.g., uracil, thymine, and cytosine) moiety present in nucleosides and nucleotides which form hydrogen bonds in nucleic acid hybridization. In the context of the present invention, the term nucleobase also encompasses alternative nucleobases which may differ from naturally-occurring nucleobases but are functional during nucleic acid hybridization. In this context “nucleobase” refers to both naturally occurring nucleobases such as adenine, guanine, cytosine, thymidine, uracil, xanthine, and hypoxanthine, as well as alternative nucleobases. Such variants are, for example, described in Hirao et al (2012) Accounts of Chemical Research vol 45, page 2055 and Bergstrom (2009) Current Protocols in Nucleic Acid Chemistry Suppl. 37 Chapter 1, unit 4.1.

[0102] In a some embodiments the nucleobase moiety is modified by changing the purine or pyrimidine into a modified purine or pyrimidine, such as substituted purine or substituted pyrimidine, such as an “alternative nucleobase” selected from isocytosine, pseudoisocytosine, 5-methylcytosine, 5-thiozolo-cytosine, 5-propynyl-cytosine, 5-propynyl-uracil, 5-bromouracil, 5-thiazolo-uracil, 2-thio-uracil, pseudouracil, 1-methylpseudouracil, 5-methoxyuracil, 2′-thio-thymine, hypoxanthine, diaminopurine, 6-aminopurine, 2-aminopurine, 2,6-diaminopurine, and 2-chloro-6-aminopurine.

[0103] The nucleobase moieties may be indicated by the letter code for each corresponding nucleobase, e.g. A, T, G, C, or U, wherein each letter may optionally include alternative nucleobases of equivalent function.

[0104] A “sugar” or “sugar moiety,” includes naturally occurring sugars having a furanose ring. A sugar also includes an “alternative sugar,” defined as a structure that is capable of replacing the furanose ring of a nucleoside. In certain embodiments, alternative sugars are non-furanose (or 4′-substituted furanose) rings or ring systems or open systems. Such structures include simple changes relative to the natural furanose ring, such as a six-membered ring, or may be more complicated as is the case with the non-ring system used in peptide nucleic acid. Alternative sugars may also include sugar surrogates wherein the furanose ring has been replaced with another ring system such as, for example, a morpholino or hexitol ring system. Sugar moieties useful in the preparation of oligonucleotides having motifs include, without limitation, β-D-ribose, β-D-2′-deoxyribose, substituted sugars (such as 2′, 5′ and bis substituted sugars), 4′-S-sugars (such as 4′-S-ribose, 4′-S-2′-deoxyribose and 4′-S-2′-substituted ribose), bicyclic alternative sugars (such as the 2′-O—CH₂-4′ or 2′-O—(CH₂)₂₋₄′ bridged ribose derived bicyclic sugars) and sugar surrogates (such as when the ribose ring has been replaced with a morpholino or a hexitol ring system). The type of heterocyclic base and internucleoside linkage used at each position is variable and is not a factor in determining the motif. In most nucleosides having an alternative sugar moiety, the heterocyclic nucleobase is generally maintained to permit hybridization.

[0105] A “nucleotide,” as used herein refers to a monomeric unit of an oligonucleotide or polynucleotide that includes a nucleoside and an internucleoside linkage. The internucleoside linkage may or may not include a phosphate linkage. Similarly, “linked nucleosides” may or may not be linked by phosphate linkages. Many “alternative internucleoside linkages” are known in the art, including, but not limited to, phosphorothioate and boronophosphate linkages. Alternative nucleosides include bicyclic nucleosides (BNAs) (e.g., locked nucleosides (LNAs) and constrained ethyl (cEt) nucleosides), peptide nucleosides (PNAs), phosphotriesters, phosphorothionates, phosphoramidates, and other variants of the phosphate backbone of native nucleoside, including those described herein.

[0106] An “alternative nucleotide” as used herein, refers to a nucleotide having an alternative nucleobase or an alternative sugar, and an internucleoside linkage, which may include alternative nucleoside linkages.

[0107] The term “nucleoside” refers to a monomeric unit of an oligonucleotide or a polynucleotide having a nucleobase and a sugar moiety. A nucleoside may include those that are naturally-occurring as well as alternative nucleosides, such as those described herein. The nucleobase of a nucleoside may be a naturally-occurring nucleobase or an alternative nucleobase. Similarly, the sugar moiety of a nucleoside may be a naturally-occurring sugar or an alternative sugar.

[0108] The term “alternative nucleoside” refers to a nucleoside having an alternative sugar or an alternative nucleobase, such as those described herein.

[0109] The term “nuclease resistant nucleotide” as used herein refers to nucleotides which limit nuclease degradation of oligonucleotides. Nuclease resistant nucleotides generally increase stability of oligonucleotides by being poor substrates for the nucleases. Nuclease resistant nucleotides are known in the art, e.g., 2′-O-methyl-nucleotides and 2′-fluoro-nucleotides.

[0110] The terms “oligonucleotide” and “polynucleotide” as used herein, are defined as it is generally understood by the skilled person as a molecule including two or more covalently linked nucleosides. Such covalently bound nucleosides may also be referred to as nucleic acid molecules or oligomers. Oligonucleotides are commonly made in the laboratory by solid-phase chemical synthesis followed by purification. When referring to a sequence of the oligonucleotide, reference is made to the sequence or order of nucleobase moieties, or modifications thereof, of the covalently linked nucleotides or nucleosides. The oligonucleotide of the invention may be man-made, and is chemically synthesized, and is typically purified or isolated. Oligonucleotide is also intended to include (i) compounds that have one or more furanose moieties that are replaced by furanose derivatives or by any structure, cyclic or acyclic, that may be used as a point of covalent attachment for the base moiety, (ii) compounds that have one or more phosphodiester linkages that are either modified, as in the case of phosphoramidate or phosphorothioate linkages, or completely replaced by a suitable linking moiety as in the case of formacetal or riboacetal linkages, and/or (iii) compounds that have one or more linked furanose-phosphodiester linkage moieties replaced by any structure, cyclic or acyclic, that may be used as a point of covalent attachment for the base moiety. The oligonucleotide of the invention may include one or more alternative nucleosides or nucleotides (e.g., including those described herein). It is also understood that oligonucleotide includes compositions lacking a sugar moiety or nucleobase but is still capable of forming a pairing with or hybridizing to a target sequence.

[0111] “Oligonucleotide” refers to a short polynucleotide (e.g., of 100 or fewer linked nucleosides).

[0112] The phrases “an oligonucleotide that is capable of effecting an adenosine deaminase acting on RNA (ADAR)-mediated adenosine to inosine alteration” or “a guide oligonucleotide that is capable of effecting an ADAR-mediated adenosine to inosine alteration” refer to an oligonucleotide that is specific for a target sequence and is capable to be utilized for the deamination reaction of a specific adenosine in a target sequence through an ADAR-mediated pathway. The oligonucleotide may comprise a nucleic acid sequence complementary to a target sequence, e.g., a LKKR2 mRNA sequence comprising the SNP associated with PD. In some embodiments, the oligonucleotides may comprise a nucleic acid sequence complementary to target mRNA with the exception of at least one mismatch. The oligonucleotide includes a mismatch opposite the target adenosine. In some embodiments, the oligonucleotides for use in the methods of the present invention do not include those used by any other gene editing technologies known in the art., e.g., CRISPR.

[0113] The oligonucleotide may be of any length, and may range from about 10-100 bases in length, e.g., about 15-100 bases in length or about 18-100 bases in length, for example, about 10, 11, 12, 13, 14, 15, 16, 17, 18, 19, 20, 21, 22, 23, 24, 25, 26, 27, 28, 29, 30, 31, 32, 33, 34, 35, 36, 37, 38, 39, 40, 41, 42, 43, 44, 45, 46, 47, 48, 49, 50, 51, 52, 53, 54, 55, 56, 57, 58, 59, 60, 61, 62, 63, 64, 65, 66, 67, 68, 69, 70, 71, 72, 73, 74, 75, 76, 77, 78, 79, 80, 81, 82, 83, 84, 85, 86, 87, 88, 89, 90, 91, 92, 93, 94, 95, 96, 97, 98, 99, or 100 bases in length, such as about 15-50, 15-49, 15-48, 15-47, 15-46, 15-45, 15-44, 15-43, 15-42, 15-41, 15-40, 15-39, 15-38, 15-37, 15-36, 15-35, 15-34, 15-33, 15-32, 15-31, 15-31, 15-30, 18-50, 18-49, 18-48, 18-47, 18-46, 18-45, 18-44, 18-43, 18-42, 18-41, 18-40, 18-39, 18-38, 18-37, 18-36, 18-35, 18-34, 18-33, 18-32, 18-31, 18-31, 18-30, 19-50, 19-49, 19-48, 19-47, 19-46, 19-45, 19-44, 19-43, 19-42, 19-41, 19-40, 19-39, 19-38, 19-37, 19-36, 19-35, 19-34, 19-33, 19-32, 19-31, 19-31, 19-30, 20-50, 20-49, 20-48, 20-47, 20-46, 20-45, 20-44, 20-43, 20-42, 20-41, 20-40, 20-39, 20-38, 20-37, 20-36, 20-35, 20-34, 20-33, 20-32, 20-31, 20-31, 20-30, 21-50, 21-49, 21-48, 21-47, 21-46, 21-45, 21-44, 21-43, 21-42, 21-41, 21-40, 21-39, 21-38, 21-37, 21-36, 21-35, 21-34, 21-33, 21-32, 21-31, 21-31, or 21-30 bases in length. Ranges and lengths intermediate to the above recited ranges and lengths are also contemplated to be part of the invention.

[0114] The term “linker” or “linking group” is a connection between two atoms that links one chemical group or segment of interest to another chemical group or segment of interest via one or more covalent bonds. Conjugate moieties can be attached to the oligonucleotide directly or through a linking moiety (e.g. linker or tether). Linkers serve to covalently connect a third region, e.g. a conjugate moiety to an oligonucleotide (e.g. the termini of region A or C). In some embodiments of the invention the conjugate or oligonucleotide conjugate of the invention may optionally, include a linker region which is positioned between the oligonucleotide and the conjugate moiety. In some embodiments, the linker between the conjugate and oligonucleotide is biocleavable. Phosphodiester containing biocleavable linkers are described in more detail in WO 2014/076195 (herein incorporated by reference).

[0115] “Complementary” polynucleotides are those that are capable of base pairing according to the standard Watson-Crick complementarity rules. Specifically, purines will base pair with pyrimidines to form a combination of guanine paired with cytosine (G:C) and adenine paired with either thymine (A:T) in the case of DNA, or adenine paired with uracil (A:U) in the case of RNA. It is understood that two polynucleotides may hybridize to each other even if they are not completely complementary to each other, provided that each has at least one region that is substantially complementary to the other. Complementary sequences between an oligonucleotide and a target sequence as described herein, include base-pairing of the oligonucleotide or polynucleotide including a first nucleotide sequence to an oligonucleotide or polynucleotide including a second nucleotide sequence over the entire length of one or both nucleotide sequences. Such sequences can be referred to as “fully complementary” with respect to each other herein. However, where a first sequence is referred to as “substantially complementary” with respect to a second sequence herein, the two sequences can be fully complementary, or they can form one or more, but generally no more than 5, 4, 3 or 2 mismatched base pairs upon hybridization for a duplex up to 30 base pairs, while retaining the ability to hybridize under the conditions most relevant to their ultimate application, e.g., deamination of an adenosine. “Substantially complementary” can also refer to a polynucleotide that is substantially complementary to a contiguous portion of the mRNA of interest (e.g., an mRNA having a target adenosine). For example, a polynucleotide is complementary to at least a part of the mRNA of interest if the sequence is substantially complementary to a non-interrupted portion of the mRNA of interest. In some embodiments, the oligonucleotide, as described herein, is at least 50%, at least 55%, at least 60%, at least 65%, at least 70%, at least 75% at least 80%, at least 85%, at least 90%, at least 91%, at least 92%, at least 93%, at least 94%, at least 95%, at least 96%, at least 97%, at least 98%, at least 99%, at least 99.1%, at least 99.2%, at least 99.3%, at least 99.4%, at least 99.5%, at least 99.6%, at least 99.7%, at least 99.8%, or at least 99.9% complementary to the target sequence.

[0116] As used herein, and unless otherwise indicated, the term “complementary,” when used to describe a first nucleotide or nucleoside sequence in relation to a second nucleotide or nucleoside sequence, refers to the ability of an oligonucleotide or polynucleotide including the first nucleotide or nucleoside sequence to hybridize and form a duplex structure under certain conditions with an oligonucleotide or polynucleotide including the second nucleotide sequence, as will be understood by the skilled person. Such conditions can, for example, be stringent conditions, where stringent conditions can include: 400 mM NaCl, 40 mM PIPES pH 6.4, 1 mM EDTA, 50° C., or 70° C., for 12-16 hours followed by washing (see, e.g., “Molecular Cloning: A Laboratory Manual, Sambrook, et al. (1989) Cold Spring Harbor Laboratory Press). Other conditions, such as physiologically relevant conditions as can be encountered inside an organism, can apply. The skilled person will be able to determine the set of conditions most appropriate for a test of complementarity of two sequences in accordance with the ultimate application of the hybridized nucleotides or nucleosides.

[0117] As used herein, the terms “variant” and “derivative” are used interchangeably and refer to naturally-occurring, synthetic, and semi-synthetic analogues of a compound, peptide, protein, or other substance described herein. A variant or derivative of a compound, peptide, protein, or other substance described herein may retain or improve upon the biological activity of the original material.

[0118] The term“mutation,” as used herein, refers to a substitution of a residue within a sequence, e.g., a nucleic acid or amino acid sequence, with another residue, or a deletion or insertion of one or more residues within a sequence. Mutations are typically described herein by identifying the original residue followed by the position of the residue within the sequence and by the identity of the newly substituted residue. Various methods for making the amino acid substitutions (mutations) provided herein are well known in the art, and are provided by, for example, Green and Sambrook, Molecular Cloning: A Laboratory Manual (4th ed., Cold Spring Harbor Laboratory Press, Cold Spring Harbor, N.Y. (2012)). In some embodiments, the presently disclosed compositions can efficiently generate an“intended mutation”, such as a point mutation, in a nucleic acid (e.g., a nucleic acid within a genome of a subject) without generating a significant number of unintended mutations, such as unintended point mutations. In some embodiments, an intended mutation is a mutation that is generated by a specific guide oligonucleotide, specifically designed to generate the intended mutation. In general, mutations made or identified in a sequence (e.g., an amino acid sequence as described herein) are numbered in relation to a reference (or wild type) sequence, i.e., a sequence that does not contain the mutations. The skilled practitioner in the art would readily understand how to determine the position of mutations in amino acid and nucleic acid sequences relative to a reference sequence.

[0119] The term “contacting,” as used herein, includes contacting a target gene, e.g., LRRK2, by any means. In some embodiments, a target gene is contacted with a guide oligonucleotide in a cell. Contacting an LRRK2 polynucleotide in a cell with a guide oligonucleotide includes contacting the LRRK2 polynucleotide in a cell in vitro with the guide oligonucleotide or contacting the LRRK2 polynucleotide in a cell in vivo with the guide oligonucleotide.

[0120] Contacting a cell in vitro may be done, for example, by incubating the cell with the guide oligonucleotide. Contacting a cell in vivo may be done, for example, by injecting the guide oligonucleotide into or near the tissue where the cell is located, or by injecting the guide oligonucleotide agent into another area, e.g., the bloodstream or the subcutaneous space, such that the agent will subsequently reach the tissue where the cell to be contacted is located. For example, the guide oligonucleotide may contain and/or be coupled to a ligand that directs the oligonucleotide to a site of interest. Combinations of in vitro and in vivo methods of contacting are also possible. For example, a cell may also be contacted in vitro with a guide oligonucleotide and subsequently transplanted into a subject.

[0121] In one embodiment, contacting a cell with a guide oligonucleotide includes “introducing” or “delivering the oligonucleotide into the cell” by facilitating or effecting uptake or absorption into the cell. Absorption or uptake of a guide oligonucleotide can occur through unaided diffusive or active cellular processes, or by auxiliary agents or devices. Introducing a guide oligonucleotide into a cell may be in vitro and/or in vivo. For example, for in vivo introduction, oligonucleotides can be injected into a tissue site or administered systemically. In vitro introduction into a cell includes methods known in the art such as electroporation and lipofection. Further approaches are described herein below and/or are known in the art.

[0122] As used herein, “lipid nanoparticle” or “LNP” is a vesicle including a lipid layer encapsulating a pharmaceutically active molecule, such as a nucleic acid molecule, e.g., an oligonucleotide. LNP refers to a stable nucleic acid-lipid particle. LNPs typically contain a cationic, ionizable lipid, a non-cationic lipid, and a lipid that prevents aggregation of the particle (e.g., a PEG-lipid conjugate). LNPs are described in, for example, U.S. Pat. Nos. 6,858,225; 6,815,432; 8,158,601; and 8,058,069, the entire contents of which are hereby incorporated herein by reference.

[0123] As used herein, the term “liposome” refers to a vesicle composed of amphiphilic lipids arranged in at least one bilayer, e.g., one bilayer or a plurality of bilayers. Liposomes include unilamellar and multilamellar vesicles that have a membrane formed from a lipophilic material and an aqueous interior. The aqueous portion contains the oligonucleotide composition. The lipophilic material isolates the aqueous interior from an aqueous exterior, which typically does not include the oligonucleotide composition, although in some examples, it may. Liposomes also include “sterically stabilized” liposomes, a term which, as used herein, refers to liposomes including one or more specialized lipids that, when incorporated into liposomes, result in enhanced circulation lifetimes relative to liposomes lacking such specialized lipids.

[0124] “Micelles” are defined herein as a particular type of molecular assembly in which amphipathic molecules are arranged in a spherical structure such that all the hydrophobic portions of the molecules are directed inward, leaving the hydrophilic portions in contact with the surrounding aqueous phase. The converse arrangement exists if the environment is hydrophobic.

[0125] By “determining the level of a protein” is meant the detection of a protein, or an mRNA encoding the protein, by methods known in the art either directly or indirectly. “Directly determining” means performing a process (e.g., performing an assay or test on a sample or “analyzing a sample” as that term is defined herein) to obtain the physical entity or value. “Indirectly determining” refers to receiving the physical entity or value from another party or source (e.g., a third-party laboratory that directly acquired the physical entity or value). Methods to measure protein level generally include, but are not limited to, western blotting, immunoblotting, enzyme-linked immunosorbent assay (ELISA), radioimmunoassay (RIA), immunoprecipitation, immunofluorescence, surface plasmon resonance, chemiluminescence, fluorescent polarization, phosphorescence, immunohistochemical analysis, matrix-assisted laser desorption/ionization time-of-flight (MALDI-TOF) mass spectrometry, liquid chromatography (LC)-mass spectrometry, microcytometry, microscopy, fluorescence activated cell sorting (FACS), and flow cytometry, as well as assays based on a property of a protein including, but not limited to, enzymatic activity or interaction with other protein partners. Methods to measure mRNA levels are known in the art.

[0126] “Percent (%) sequence identity” with respect to a reference polynucleotide or polypeptide sequence is defined as the percentage of nucleic acids or amino acids in a candidate sequence that are identical to the nucleic acids or amino acids in the reference polynucleotide or polypeptide sequence, after aligning the sequences and introducing gaps, if necessary, to achieve the maximum percent sequence identity. Alignment for purposes of determining percent nucleic acid or amino acid sequence identity can be achieved in various ways that are within the capabilities of one of skill in the art, for example, using publicly available computer software such as BLAST, BLAST-2, or Megalign software. Those skilled in the art can determine appropriate parameters for aligning sequences, including any algorithms needed to achieve maximal alignment over the full length of the sequences being compared. For example, percent sequence identity values may be generated using the sequence comparison computer program BLAST. As an illustration, the percent sequence identity of a given nucleic acid or amino acid sequence, A, to, with, or against a given nucleic acid or amino acid sequence, B, (which can alternatively be phrased as a given nucleic acid or amino acid sequence, A that has a certain percent sequence identity to, with, or against a given nucleic acid or amino acid sequence, B) is calculated as follows:

100 multiplied by (the fraction X/Y)

[0127] where X is the number of nucleotides or amino acids scored as identical matches by a sequence alignment program (e.g., BLAST) in that program's alignment of A and B, and where Y is the total number of nucleic acids in B. It will be appreciated that where the length of nucleic acid or amino acid sequence A is not equal to the length of nucleic acid or amino acid sequence B, the percent sequence identity of A to B will not equal the percent sequence identity of B to A.

[0128] By “level” is meant a level or activity of a protein, or mRNA encoding the protein, as compared to a reference. The reference can be any useful reference, as defined herein. By a “decreased level” or an “increased level” of a protein is meant a decrease or increase in protein level, as compared to a reference (e.g., a decrease or an increase by about 5%, about 10%, about 15%, about 20%, about 25%, about 30%, about 35%, about 40%, about 45%, about 50%, about 55%, about 60%, about 65%, about 70%, about 75%, about 80%, about 85%, about 90%, about 95%, about 100%, about 150%, about 200%, about 300%, about 400%, about 500%, or more; a decrease or an increase of more than about 10%, about 15%, about 20%, about 50%, about 75%, about 100%, or about 200%, as compared to a reference; a decrease or an increase by less than about 0.01-fold, about 0.02-fold, about 0.1-fold, about 0.3-fold, about 0.5-fold, about 0.8-fold, or less; or an increase by more than about 1.2-fold, about 1.4-fold, about 1.5-fold, about 1.8-fold, about 2-fold, about 3-fold, about 3.5-fold, about 4.5-fold, about 5-fold, about 10-fold, about 15-fold, about 20-fold, about 30-fold, about 40-fold, about 50-fold, about 100-fold, about 1000-fold, or more). A level of a protein may be expressed in mass/vol (e.g., g/dL, mg/mL, g/mL, ng/mL) or percentage relative to total protein or mRNA in a sample.

[0129] The term “pharmaceutical composition,” as used herein, represents a composition containing a compound described herein formulated with a pharmaceutically acceptable excipient, and preferably manufactured or sold with the approval of a governmental regulatory agency as part of a therapeutic regimen for the treatment of disease in a mammal. Pharmaceutical compositions can be formulated, for example, for oral administration in unit dosage form (e.g., a tablet, capsule, caplet, gelcap, or syrup); for topical administration (e.g., as a cream, gel, lotion, or ointment); for intravenous administration (e.g., as a sterile solution free of particulate emboli and in a solvent system suitable for intravenous use); for intrathecal injection; for intracerebroventricular injections; for intraparenchymal injection; or in any other pharmaceutically acceptable formulation.

[0130] A “pharmaceutically acceptable excipient,” as used herein, refers any ingredient other than the compounds described herein (for example, a vehicle capable of suspending or dissolving the active compound) and having the properties of being substantially nontoxic and non-inflammatory in a patient. Excipients may include, for example: antiadherents, antioxidants, binders, coatings, compression aids, disintegrants, dyes (colors), emollients, emulsifiers, fillers (diluents), film formers or coatings, flavors, fragrances, glidants (flow enhancers), lubricants, preservatives, printing inks, sorbents, suspending or dispersing agents, sweeteners, and waters of hydration. Exemplary excipients include, but are not limited to: butylated hydroxytoluene (BHT), calcium carbonate, calcium phosphate (dibasic), calcium stearate, croscarmellose, crosslinked polyvinyl pyrrolidone, citric acid, crospovidone, cysteine, ethylcellulose, gelatin, hydroxypropyl cellulose, hydroxypropyl methylcellulose, lactose, magnesium stearate, maltitol, mannitol, methionine, methylcellulose, methyl paraben, microcrystalline cellulose, polyethylene glycol, polyvinyl pyrrolidone, povidone, pregelatinized starch, propyl paraben, retinyl palmitate, shellac, silicon dioxide, sodium carboxymethyl cellulose, sodium citrate, sodium starch glycolate, sorbitol, starch (corn), stearic acid, sucrose, talc, titanium dioxide, vitamin A, vitamin E, vitamin C, and xylitol.

[0131] As used herein, the term “pharmaceutically acceptable salt” means any pharmaceutically acceptable salt of the compound of any of the compounds described herein. For example, pharmaceutically acceptable salts of any of the compounds described herein include those that are within the scope of sound medical judgment, suitable for use in contact with the tissues of humans and animals without undue toxicity, irritation, allergic response and are commensurate with a reasonable benefit/risk ratio. Pharmaceutically acceptable salts are well known in the art. For example, pharmaceutically acceptable salts are described in: Berge et al., J. Pharmaceutical Sciences 66:1-19, 1977 and in Pharmaceutical Salts: Properties, Selection, and Use, (Eds. P. H. Stahl and C. G. Wermuth), Wiley-VCH, 2008. The salts can be prepared in situ during the final isolation and purification of the compounds described herein or separately by reacting a free base group with a suitable organic acid.

[0132] The compounds described herein may have ionizable groups so as to be capable of preparation as pharmaceutically acceptable salts. These salts may be acid addition salts involving inorganic or organic acids or the salts may, in the case of acidic forms of the compounds described herein, be prepared from inorganic or organic bases. Frequently, the compounds are prepared or used as pharmaceutically acceptable salts prepared as addition products of pharmaceutically acceptable acids or bases. Suitable pharmaceutically acceptable acids and bases and methods for preparation of the appropriate salts are well-known in the art. Salts may be prepared from pharmaceutically acceptable non-toxic acids and bases including inorganic and organic acids and bases. Representative acid addition salts include acetate, adipate, alginate, ascorbate, aspartate, benzenesulfonate, benzoate, bisulfate, borate, butyrate, camphorate, camphorsulfonate, citrate, cyclopentanepropionate, digluconate, dodecylsulfate, ethanesulfonate, fumarate, glucoheptonate, glycerophosphate, hemisulfate, heptonate, hexanoate, hydrobromide, hydrochloride, hydroiodide, 2-hydroxy-ethanesulfonate, lactobionate, lactate, laurate, lauryl sulfate, malate, maleate, malonate, methanesulfonate, 2-naphthalenesulfonate, nicotinate, nitrate, oleate, oxalate, palmitate, pamoate, pectinate, persulfate, 3-phenylpropionate, phosphate, picrate, pivalate, propionate, stearate, succinate, sulfate, tartrate, thiocyanate, toluenesulfonate, undecanoate, and valerate salts. Representative alkali or alkaline earth metal salts include sodium, lithium, potassium, calcium, and magnesium, as well as nontoxic ammonium, quaternary ammonium, and amine cations, including, but not limited to ammonium, tetramethylammonium, tetraethylammonium, methylamine, dimethylamine, trimethylamine, triethylamine, and ethylamine.

[0133] By a “reference” is meant any useful reference used to compare protein or mRNA levels or activity. The reference can be any sample, standard, standard curve, or level that is used for comparison purposes. The reference can be a normal reference sample or a reference standard or level. A “reference sample” can be, for example, a control, e.g., a predetermined negative control value such as a “normal control” or a prior sample taken from the same subject; a sample from a normal healthy subject, such as a normal cell or normal tissue; a sample (e.g., a cell or tissue) from a subject not having a disease; a sample from a subject that is diagnosed with a disease, but not yet treated with a compound described herein; a sample from a subject that has been treated by a compound described herein; or a sample of a purified protein (e.g., any described herein) at a known normal concentration. By “reference standard or level” is meant a value or number derived from a reference sample. A “normal control value” is a pre-determined value indicative of non-disease state, e.g., a value expected in a healthy control subject. Typically, a normal control value is expressed as a range (“between X and Y”), a high threshold (“no higher than X”), or a low threshold (“no lower than X”). A subject having a measured value within the normal control value for a particular biomarker is typically referred to as “within normal limits” for that biomarker. A normal reference standard or level can be a value or number derived from a normal subject not having a disease or disorder; a subject that has been treated with a compound described herein. In preferred embodiments, the reference sample, standard, or level is matched to the sample subject sample by at least one of the following criteria: age, weight, sex, disease stage, and overall health. A standard curve of levels of a purified protein, e.g., any described herein, within the normal reference range can also be used as a reference.

[0134] As used herein, the term “subject” refers to any organism to which a composition in accordance with the invention may be administered, e.g., for experimental, diagnostic, prophylactic, and/or therapeutic purposes. Typical subjects include any animal (e.g., mammals such as mice, rats, rabbits, non-human primates, and humans). A subject may seek or be in need of treatment, require treatment, be receiving treatment, be receiving treatment in the future, or be a human or animal who is under care by a trained professional for a particular disease or condition.

[0135] As used herein, the term “administration” refers to the administration of a composition (e.g., a compound or a preparation that includes a compound as described herein) to a subject or system. Administration to an animal subject (e.g., to a human) may be by any appropriate route, such as the one described herein.

[0136] As used herein, a “combination therapy” or “administered in combination” means that two (or more) different agents or treatments are administered to a subject as part of a defined treatment regimen for a particular disease or condition. The treatment regimen defines the doses and periodicity of administration of each agent such that the effects of the separate agents on the subject overlap. In some embodiments, the delivery of the two or more agents is simultaneous or concurrent and the agents may be co-formulated. In some embodiments, the two or more agents are not co-formulated and are administered in a sequential manner as part of a prescribed regimen. In some embodiments, administration of two or more agents or treatments in combination is such that the reduction in a symptom, or other parameter related to the disorder is greater than what would be observed with one agent or treatment delivered alone or in the absence of the other. The effect of the two treatments can be partially additive, wholly additive, or greater than additive (e.g., synergistic). Sequential or substantially simultaneous administration of each therapeutic agent can be effected by any appropriate route including, but not limited to, oral routes, intravenous routes, intramuscular routes, and direct absorption through mucous membrane tissues. The therapeutic agents can be administered by the same route or by different routes. For example, a first therapeutic agent of the combination may be administered by intravenous injection while a second therapeutic agent of the combination may be administered orally.

[0137] As used herein, the terms “treat,” “treated,” or “treating” mean both therapeutic treatment and prophylactic or preventative measures wherein the object is to prevent or slow down (lessen) an undesired physiological condition, disorder, or disease, or obtain beneficial or desired clinical results. Beneficial or desired clinical results include, but are not limited to, alleviation of symptoms; diminishment of the extent of a condition, disorder, or disease; stabilized (i.e., not worsening) state of condition, disorder, or disease; delay in onset or slowing of condition, disorder, or disease progression; amelioration of the condition, disorder, or disease state or remission (whether partial or total), whether detectable or undetectable; an amelioration of at least one measurable physical parameter, not necessarily discernible by the patient; or enhancement or improvement of condition, disorder, or disease. Treatment includes eliciting a clinically significant response without excessive levels of side effects. Treatment also includes prolonging survival as compared to expected survival if not receiving treatment.

[0138] As used herein, the terms “effective amount,” “therapeutically effective amount,” and “a “sufficient amount” of an agent that results in a therapeutic effect (e.g., in a cell or a subject) described herein refer to a quantity sufficient to, when administered to the subject, including a human, effect beneficial or desired results, including clinical results, and, as such, an “effective amount” or synonym thereto depends on the context in which it is being applied. For example, in the context of treating a disorder, it is an amount of the agent that is sufficient to achieve a treatment response as compared to the response obtained without administration. The amount of a given agent will vary depending upon various factors, such as the given agent, the pharmaceutical formulation, the route of administration, the type of disease or disorder, the identity of the subject (e.g., age, sex, and/or weight) or host being treated, and the like, but can nevertheless be routinely determined by one of skill in the art. Also, as used herein, a “therapeutically effective amount” of an agent is an amount which results in a beneficial or desired result in a subject as compared to a control. As defined herein, a therapeutically effective amount of an agent may be readily determined by one of ordinary skill by routine methods known in the art. Dosage regimen may be adjusted to provide the optimum therapeutic response.

[0139] “Prophylactically effective amount,” as used herein, is intended to include the amount of an oligonucleotide that, when administered to a subject having or predisposed to have a disorder, is sufficient to prevent or ameliorate the disease or one or more symptoms of the disease. Ameliorating the disease includes slowing the course of the disease or reducing the severity of later-developing disease. The “prophylactically effective amount” may vary depending on the oligonucleotide, how the agent is administered, the degree of risk of disease, and the history, age, weight, family history, genetic makeup, the types of preceding or concomitant treatments, if any, and other individual characteristics of the patient to be treated.

[0140] A “therapeutically-effective amount” or “prophylactically effective amount” also includes an amount (either administered in a single or in multiple doses) of an oligonucleotide that produces some desired local or systemic effect at a reasonable benefit/risk ratio applicable to any treatment. Oligonucleotides employed in the methods of the present invention may be administered in a sufficient amount to produce a reasonable benefit/risk ratio applicable to such treatment.

[0141] A prophylactically effective amount may also refer to, for example, an amount sufficient to, when administered to the subject, including a human, to delay the onset of one or more of the disorders described herein by at least 120 days, for example, at least 6 months, at least 12 months, at least 2 years, at least 3 years, at least 4 years, at least 5 years, at least 10 years or more, when compared with the predicted onset.

[0142] For any of the following chemical definitions, a number following an atomic symbol indicates that total number of atoms of that element that are present in a particular chemical moiety. As will be understood, other atoms, such as H atoms, or substituent groups, as described herein, may be present, as necessary, to satisfy the valences of the atoms. For example, an unsubstituted C₂ alkyl group has the formula —CH₂CH₃. When used with the groups defined herein, a reference to the number of carbon atoms includes the divalent carbon in acetal and ketal groups but does not include the carbonyl carbon in acyl, ester, carbonate, or carbamate groups. A reference to the number of oxygen, nitrogen, or sulfur atoms in a heteroaryl group only includes those atoms that form a part of a heterocyclic ring.

[0143] When a particular substituent may be present multiple times in the same structure, each instance of the substituent may be independently selected from the list of possible definitions for that substituent.

[0144] The term “alkyl,” as used herein, refers to a branched or straight-chain monovalent saturated aliphatic hydrocarbon radical of 1 to 20 carbon atoms (e.g., 1 to 16 carbon atoms, 1 to 10 carbon atoms, 1 to 6 carbon atoms, or 1 to 3 carbon atoms).

[0145] An alkylene is a divalent alkyl group. The term “alkenyl,” as used herein, alone or in combination with other groups, refers to a straight chain or branched hydrocarbon residue having a carbon-carbon double bond and having 2 to 20 carbon atoms (e.g., 2 to 16 carbon atoms, 2 to 10 carbon atoms, 2 to 6 carbon atoms, or 2 carbon atoms).

[0146] The term “halogen,” as used herein, means a fluorine (fluoro), chlorine (chloro), bromine (bromo), or iodine (iodo) radical.

[0147] The term “heteroalkyl,” as used herein, refers to an alkyl group, as defined herein, in which one or more of the constituent carbon atoms have been replaced by nitrogen, oxygen, or sulfur. In some embodiments, the heteroalkyl group can be further substituted with 1, 2, 3, or 4 substituent groups as described herein for alkyl groups. Examples of heteroalkyl groups are an “alkoxy” which, as used herein, refers alkyl-O— (e.g., methoxy and ethoxy). A heteroalkylene is a divalent heteroalkyl group. The term “heteroalkenyl,” as used herein, refers to an alkenyl group, as defined herein, in which one or more of the constituent carbon atoms have been replaced by nitrogen, oxygen, or sulfur. In some embodiments, the heteroalkenyl group can be further substituted with 1, 2, 3, or 4 substituent groups as described herein for alkenyl groups. Examples of heteroalkenyl groups are an “alkenoxy” which, as used herein, refers alkenyl-O—. A heteroalkenylene is a divalent heteroalkenyl group. The term “heteroalkynyl,” as used herein, refers to an alkynyl group, as defined herein, in which one or more of the constituent carbon atoms have been replaced by nitrogen, oxygen, or sulfur. In some embodiments, the heteroalkynyl group can be further substituted with 1, 2, 3, or 4 substituent groups as described herein for alkynyl groups. Examples of heteroalkynyl groups are an “alkynoxy” which, as used herein, refers alkynyl-O—. A heteroalkynylene is a divalent heteroalkynyl group.

[0148] The term “hydroxy,” as used herein, represents an —OH group.

[0149] The alkyl, heteroalkyl groups may be substituted or unsubstituted. When substituted, there will generally be 1 to 4 substituents present, unless otherwise specified. Substituents include, for example: alkyl (e.g., unsubstituted and substituted, where the substituents include any group described herein, e.g., aryl, halo, hydroxy), aryl (e.g., substituted and unsubstituted phenyl), carbocyclyl (e.g., substituted and unsubstituted cycloalkyl), halo (e.g., fluoro), hydroxyl, heteroalkyl (e.g., substituted and unsubstituted methoxy, ethoxy, or thioalkoxy), heteroaryl, heterocyclyl, amino (e.g., NH₂ or mono- or dialkyl amino), azido, cyano, nitro, or thiol. Aryl, carbocyclyl (e.g., cycloalkyl), heteroaryl, and heterocyclyl groups may also be substituted with alkyl (unsubstituted and substituted such as arylalkyl (e.g., substituted and unsubstituted benzyl)).

[0150] Compounds of the invention can have one or more asymmetric carbon atoms and can exist in the form of optically pure enantiomers, mixtures of enantiomers such as, for example, racemates, optically pure diastereoisomers, mixtures of diastereoisomers, diastereoisomeric racemates, or mixtures of diastereoisomeric racemates. The optically active forms can be obtained for example by resolution of the racemates, by asymmetric synthesis or asymmetric chromatography (chromatography with a chiral adsorbent or eluant). That is, certain of the disclosed compounds may exist in various stereoisomeric forms. Stereoisomers are compounds that differ only in their spatial arrangement. Enantiomers are pairs of stereoisomers whose mirror images are not superimposable, most commonly because they contain an asymmetrically substituted carbon atom that acts as a chiral center. “Enantiomer” means one of a pair of molecules that are mirror images of each other and are not superimposable. Diastereomers are stereoisomers that are not related as mirror images, most commonly because they contain two or more asymmetrically substituted carbon atoms and represent the configuration of substituents around one or more chiral carbon atoms. Enantiomers of a compound can be prepared, for example, by separating an enantiomer from a racemate using one or more well-known techniques and methods, such as, for example, chiral chromatography and separation methods based thereon. The appropriate technique and/or method for separating an enantiomer of a compound described herein from a racemic mixture can be readily determined by those of skill in the art. “Racemate” or “racemic mixture” means a compound containing two enantiomers, wherein such mixtures exhibit no optical activity; i.e., they do not rotate the plane of polarized light. “Geometric isomer” means isomers that differ in the orientation of substituent atoms in relationship to a carbon-carbon double bond, to a cycloalkyl ring, or to a bridged bicyclic system. Atoms (other than H) on each side of a carbon-carbon double bond may be in an E (substituents are on 25 opposite sides of the carbon-carbon double bond) or Z (substituents are oriented on the same side) configuration. “R,” “S,” “S*,” “R*,” “E,” “Z,” “cis,” and “trans,” indicate configurations relative to the core molecule. Certain of the disclosed compounds may exist in atropisomeric forms. Atropisomers are stereoisomers resulting from hindered rotation about single bonds where the steric strain barrier to rotation is high enough to allow for the isolation of the conformers. The compounds of the invention may be prepared as individual isomers by either isomer-specific synthesis or resolved from an isomeric mixture. Conventional resolution techniques include forming the salt of a free base of each isomer of an isomeric pair using an optically active acid (followed by fractional crystallization and regeneration of the free base), forming the salt of the acid form of each isomer of an isomeric pair using an optically active amine (followed by fractional crystallization and regeneration of the free acid), forming an ester or amide 35 of each of the isomers of an isomeric pair using an optically pure acid, amine or alcohol (followed by chromatographic separation and removal of the chiral auxiliary), or resolving an isomeric mixture of either a starting material or a final product using various well known chromatographic methods. When the stereochemistry of a disclosed compound is named or depicted by structure, the named or depicted stereoisomer is at least 60%, 70%, 80%, 90%, 99%, or 99.9% by weight relative to the other stereoisomers. When a single enantiomer is named or depicted by structure, the depicted or named enantiomer is at least 60%, 70%, 80%, 90%, 99%, or 99.9% by weight optically pure. When a single diastereomer is named or depicted by structure, the depicted or named diastereomer is at least 60%, 70%, 80%, 90%, 99%, or 99.9% by weight pure. Percent optical purity is the ratio of the weight of the enantiomer or over the weight of the enantiomer plus the weight of its optical isomer. Diastereomeric purity by weight is the ratio of the weight of one diastereomer or over the weight of all the diastereomers. When the stereochemistry of a disclosed compound is named or depicted by structure, the named or depicted stereoisomer is at least 60%, 70%, 80%, 90%, 99%, or 99.9% by mole fraction pure relative to the other stereoisomers. When a single enantiomer is named or depicted by structure, the depicted or named enantiomer is at least 60%, 70%, 80%, 90%, 99%, or 99.9% by mole fraction pure. When a single diastereomer is named or depicted by structure, the depicted or named diastereomer is at least 60%, 70%, 80%, 90%, 99%, or 99.9% by mole fraction pure. Percent purity by mole fraction is the ratio of the moles of the enantiomer or over the moles of the enantiomer plus the moles of its optical isomer. Similarly, percent purity by moles fraction is the ratio of the moles of the diastereomer or over the moles of the diastereomer plus the moles of its isomer. When a disclosed compound is named or depicted by structure without indicating the stereochemistry, and the compound has at least one chiral center, it is to be understood that the name or structure encompasses either enantiomer of the compound free from the corresponding optical isomer, a racemic mixture of the compound, or mixtures enriched in one enantiomer relative to its corresponding optical isomer. When a disclosed compound is named or depicted by structure without indicating the stereochemistry and has two or more chiral centers, it is to be understood that the name or structure encompasses a diastereomer free of other diastereomers, a number of diastereomers free from other diastereomeric pairs, mixtures of diastereomers, mixtures of diastereomeric pairs, mixtures of diastereomers in which one diastereomer is enriched relative to the other diastereomer(s), or mixtures of diastereomers in which one or more diastereomer is enriched relative to the other diastereomers. The invention embraces all of these forms.

[0151] Unless otherwise defined, all technical and scientific terms used herein have the same meaning as commonly understood by one of ordinary skill in the art to which this invention belongs. Methods and materials are described herein for use in the present disclosure; other, suitable methods and materials known in the art can also be used. The materials, methods, and examples are illustrative only and not intended to be limiting. All publications, patent applications, patents, sequences, database entries, and other references mentioned herein are incorporated by reference in their entirety. In case of conflict, the present specification, including definitions, will control

[0152] The details of one or more embodiments of the invention are set forth in the description below. Other features, objects, and advantages of the invention will be apparent from the description and from the claims.

### II. Methods of the Invention

[0153] The present invention provides methods of editing an LRRK2 polynucleotide, e.g., an LRRK2 polynucleotide comprising a single nucleotide polymorphism (SNP) associated with Parkinson's Disease (PD), and methods for treating or preventing an LRRK2-associated disease, e.g., Parkinson's Disease, in a subject. The methods include contacting the LRRK2 polynucleotide with a guide oligonucleotide capable of effecting an adenosine deaminase acting on RNA (ADAR)-mediated adenosine to inosine alteration of the SNP associated with Parkinson's Disease.

[0154] The invention is used to make desired changes in a target sequence, e.g., an LRRK2 polynucleotide comprising a SNP associated with Parkinson's Disease, in a cell or a subject by site-directed editing of nucleotides through the use of an oligonucleotide that is capable of effecting an adenosine deaminase acting on RNA (ADAR)-mediated adenosine to inosine alteration of the SNP. As a result, the target sequence is edited through an adenosine deamination reaction mediated by ADAR, converting adenosines into inosine.

[0155] The changes may be in 5′ or 3′ untranslated regions of a target RNA, in splice sites, in exons (changing amino acids in protein translated from the target RNA, changing codon usage or splicing behavior by changing exonic splicing silencers or enhancers, and/or introducing or removing start or stop codons), in introns (changing splicing by altering intronic splicing silencers or intronic splicing enhancers, branch points) and in general in any region affecting RNA stability, structure or functioning. The target RNA sequence may comprise a mutation that one may wish to correct or alter, such as a transition or a transversion.

[0156] RNA editing enzymes are known in the art. In some embodiments, the RNA editing enzyme is the adenosine deaminase acting on RNA (ADARs), such as hADARI and hADAR2 in humans or human cells.

[0157] Adenosine deaminases acting on RNA (ADARs) catalyze adenosine (A) to inosine (I) editing of RNA that possesses double-stranded (ds) structure. A-to-I RNA editing results in nucleotide substitution, because I is recognized as G instead of A both by ribosomes and by RNA polymerases. A-to-I substitution can also cause dsRNA destabilization, as I:U mismatch base pairs are less stable than A:U base pairs. A-to-I editing occurs with both viral and cellular RNAs, and affects a broad range of biological processes. These include virus growth and persistence, apoptosis and embryogenesis, neurotransmitter receptor and ion channel function, pancreatic cell function, and post-transcriptional gene regulation by microRNAs. Biochemical processes that provide a framework for understanding the physiologic changes following ADAR-catalyzed A-to-I (=G) editing events include mRNA translation by changing codons and hence the amino acid sequence of proteins; pre-mRNA splicing by altering splice site recognition sequences; RNA stability by changing sequences involved in nuclease recognition; genetic stability in the case of RNA virus genomes by changing sequences during viral RNA replication; and RNA-structure-dependent activities such as microRNA production or targeting or protein-RNA interactions.

[0158] Three human ADAR genes are known, of which two encode active deaminases (ADAR1 and ADAR2). Human ADAR3 (hADAR3) has been described in the prior art, but reportedly has no deaminase activity. Alternative promoters together with alternative splicing give rise to two protein size forms of ADAR1: an interferon-inducible ADAR1-p150 deaminase that binds dsRNA and Z-DNA, and a constitutively expressed ADAR1-p110 deaminase. ADAR2, like ADAR1-p110, is constitutively expressed and binds dsRNA. It is known that only the longer isoform of ADAR1 is capable of binding to the Z-DNA structure that can be comprised in the recruiting portion of the oligonucleotide construct according to the invention. Consequently, the level of the 150 kDa isoform present in the cell may be influenced by interferon, particularly interferon-gamma (IFN-gamma). hADARI is also inducible by TNF-alpha. This provides an opportunity to develop combination therapy, whereby interferon-gamma or TNF-alpha and oligonucleotide constructs comprising Z-DNA as recruiting portion according to the invention are administered to a patient either as a combination product, or as separate products, either simultaneously or subsequently, in any order. Certain disease conditions may already coincide with increased IFN-gamma or TNF-alpha levels in certain tissues of a patient, creating further opportunities to make editing more specific for diseased tissues.

[0159] Recruiting ADAR to specific sites of selected transcripts and deamination of adenosine regardless of neighboring bases holds great promise for the treatment of disease. In some embodiments, the oligonucleotide that is capable of effecting an adenosine deaminase acting on RNA (ADAR)-mediated adenosine to inosine alteration of the SNP, e.g., a guide oligonucleotide as described herein, further comprises an ADAR-recruiting domain. In some embodiments, the ADAR-recruiting domain comprises nucleotide sequences that may be covalently linked to the oligonucleotides for use in the methods of the instant invention and may form stem-loop structures that act as recruitment and binding regions for the ADAR enzyme. Oligonucleotides including such ADAR-recruiting domains may be referred to as “axiomer AONs” or “self-looping AONs.” The ADAR-recruiting domain portion may act to recruit an endogenous ADAR enzyme present in the cell. Such ADAR-recruiting domains do not require conjugated entities or presence of modified recombinant ADAR enzymes. Alternatively, the ADAR-recruiting portion may act to recruit a recombinant ADAR fusion protein that has been delivered to a cell or to a subject via an expression vector construct including a polynucleotide encoding an ADAR fusion protein. Such ADAR-fusion proteins may include the deaminase domain of ADAR1 or ADAR2 enzymes fused to another protein, e.g., to the MS2 bacteriophage coat protein. An ADAR-recruiting domain may be a nucleotide sequence based on a natural substrate (e.g., the GluR2 receptor pre-mRNA; such as a GluR2 ADAR-recruiting domain), a Z-DNA structure, or a domain known to recruit another protein which is part of an ADAR fusion protein, e.g., an MS2 ADAR-recruiting domain known to be recognized by the dsRNA binding regions of ADAR. A stem-loop structure of an ADAR-recruiting domain can be an intermolecular stem-loop structure, formed by two separate nucleic acid strands, or an intramolecular stem loop structure, formed within a single nucleic acid strand.

[0160] In some embodiments, the ADAR is endogenously expressed in a cell. The cell is selected from the group consisting of a bacterial cell, a eukaryotic cell, a mammalian cell, and a human cell. In principle the invention can be used with cells from any mammalian species, but it is preferably used with a human cell.

[0161] The oligonucleotide capable of effecting an adenosine deaminase acting on RNA (ADAR)-mediated adenosine to inosine alteration of the SNP, e.g., a guide oligonucleotide as described herein, comprises a nucleic acid sequence complementary to the LRRK2 mRNA encoding the SNP associated with PD. In some embodiments, the guide oligonucleotides are complementary to target mRNA with the exception of at least one mismatch. The oligonucleotide includes a mismatch opposite the target adenosine.

[0162] Once the oligonucleotide hybridizes to the target mRNA sequence, it forms a double-stranded RNA structure, which can be recognized by ADAR, and facilitates the recruitment of ADAR to the target sequence. As a result, ADAR can catalyze the deamination reaction of the specific adenosine in the SNP associated with PD into an inosine.

[0163] As used herein, the phrase “SNP associated with Parkinson's Disease” refers to any SNPs that are associated with the onset or development of Parkinson's Disease. Exemplary SNPs associated with PD may include, but are not limited to, any single nucleotide change in the LRRK2 polynucleotide resulting in a pathogenic amino acid at positions 1441, 1699, 2019, 2020 and 1437 of the LRRK2 protein. These mutations have been demonstrated to be pathogenic and are associated with the late-onset of Parkinson's Disease.

[0164] In some embodiments, the LRRK2 polynucleotide comprising an SNP associated with PD encodes an LRRK2 protein comprising a pathogenic amino acid, serine, at position 2019, i.e., a G2019S mutation in the LRRK2 protein. This SNP, rs34637584, is also referred to as the G2019S variant (or, mutation) based on the change from glycine (encoded by rs34637584(G) allele) to serine (encoded by the rs34637584(A) allele) at position 2019 of the LRRK2 protein. One copy of a rs34637584(A) allele is sufficient to greatly increase one's risk for Parkinson's Disease. It is considered a disease causing mutation because it is rarely found in healthy, elderly people without Parkinson's Disease, and it has been found in both familial and sporadic types of the disease. While there are many different SNPs that can influence one's risk for Parkinson's Disease, rs34637584 is an especially common cause of the disease in Berber Arabs and Ashkenazi Jews. Overall, the risk of Parkinson's Disease for a person who inherits a rs34637584(A) allele is 28% at age 59, 51% at 69, and 74% at 79, according to the International LRRK2 Consortium.

[0165] In some embodiments, the LRRK2 polynucleotide comprising an SNP associated with PD encodes an LRRK2 protein comprising a pathogenic amino acid, histidine, at position 1441, i.e., an R1441H mutation in the LRRK2 protein. This SNP, rs34995376, is also referred to as the R1441H variant (or mutation) based on the potential change from glycine (encoded by rs34995376(G) allele) to serine (encoded by the rs34995376(A) allele) at position 1441 of the LRRK2 protein.

[0166] Upon successful editing by the methods of the invention, the rs34637584(A) allele is deaminated by ADAR and converted to the rs34637584(G) allele, and this ADAR-mediated adenosine to inosine alteration substitutes the pathogenic amino acid, serine, at position 2019 of the LRRK2 protein with a wild type amino acid, glycine, thereby removing the pathogenic or disease causing mutation in LRRK2 protein. Similarly, the rs34995376(A) allele is deaminated by ADAR and converted to the rs34995376(G) allele, and this ADAR-mediated adenosine to inosine alteration substitutes the pathogenic amino acid, histidine, at position 1441 of the LRRK2 protein with a wild type amino acid, arginine, thereby removing the pathogenic or disease causing mutation in the LRRK2 protein.

[0167] The methods of the present invention can be used with cells from any organ, e.g. skin, lung, heart, kidney, liver, pancreas, gut, muscle, gland, eye, brain, blood and the like. The invention is particularly suitable for modifying sequences in cells, tissues or organs implicated in a diseased state of a (human) subject. Such cells include but are not limited to brain cells or neurons, e.g., neurons near the base of the brain (i.e., midbrain or the substantia nigra), neurons from the brainstem, neurons in the striatum, neurons in the cortex, or neurons in the olfactory bulb. Cells outside the brain can also be included, such as those in the gut.

[0168] The methods of the invention can also be used with mammalian cells which are not naturally present in an organism e.g. with a cell line or with an embryonic stem (ES) cell. The methods of the invention can be used with various types of stem cells, including pluripotent stem cells, totipotent stem cells, embryonic stem cells, induced pluripotent stem cells, etc.

[0169] The cells can be located in vitro or in vivo. One advantage of the invention is that it can be used with cells in situ in a living organism, but it can also be used with cells in culture. In some embodiments cells are treated ex vivo and are then introduced into a living organism (e.g. re-introduced into an organism from whom they were originally derived). In some embodiments, the cell is contacted in vivo. In other embodiments, the cell is ex vivo.

[0170] The methods of invention can also be used to edit target RNA sequences in cells within a so-called organoid. Organoids are self-organized three-dimensional tissue structures derived from stem cells. Such cultures can be crafted to replicate much of the complexity of an organ, or to express selected aspects of it like producing only certain types of cells (Lancaster & Knoblich, Science 2014, vol. 345 no. 6194 1247125). In a therapeutic setting they are useful because they can be derived in vitro from a patient's cells, and the organoids can then be re-introduced to the patient as autologous material which is less likely to be rejected than a normal transplant. Thus, according to another preferred embodiment, the invention may be practised on organoids grown from tissue samples taken from a patient (e.g. from their gastrointestinal tract; see Sala et al. J Surg Res. 2009; 156(2):205-12, and Sato et al. Gastroenterology 201 1; 141: 1762-72). Upon RNA editing in accordance with the invention, the organoids, or stem cells residing within the organoids, may be used to transplant back into the patient to ameliorate organ function.

[0171] In some embodiments, the cells to be treated have a genetic mutation. The mutation may be heterozygous or homozygous. The invention can be used to modify point mutations, for example, to correct a G to A mutation. In other embodiments, the cells to be treated do not have a genetic mutation. The invention can be used to create point mutations, for example, to generate a A to G mutation.

[0172] Accordingly, the invention is not limited to correcting mutations, as it may instead be useful to change a wild-type sequence into a mutated sequence by applying oligonucleotides according to the invention. One example where it may be advantageous to modify a wild-type adenosine is to bring about skipping of an exon, for example by modifying an adenosine that happens to be a branch site required for splicing of said exon. Another example is where the adenosine defines or is part of a recognition sequence for protein binding, or is involved in secondary structure defining the stability of the mRNA. In some embodiments, however, the invention is used in the opposite way by introducing a disease-associated mutation into a cell line or an animal, in order to provide a useful research tool for the disease in question. As an example of creating a disease model for research purposes, an oligonucleotide sequence described herein provides for the recruitment of editing activity in a human cell to create a mutation in LRRK2, e.g., a G2019S mutation, and/or a R1441H mutation, that forms the basis for the onset of Parkinson's Disease. As a result, the invention can be used to provide research tools for diseases, to introduce new mutations which are less deleterious than an existing mutation.

[0173] A mutation to be reverted through RNA editing may have arisen on the level of the chromosome or some other form of DNA, such as mitochondrial DNA, or RNA, including pre-mRNA, ribosomal RNA or mitochondrial RNA. A change to be made may be in a target RNA of a pathogen, including fungi, yeasts, parasites, kinetoplastids, bacteria, phages, viruses etc, with which the cell or subject has been infected. Subsequently, the editing may take place on the RNA level on a target sequence inside such cell, subject or pathogen. Certain pathogens, such as viruses, release their nucleic acid, DNA or RNA into the cell of the infected host (cell). Other pathogens reside or circulate in the infected host. The oligonucleotide constructs of the invention may be used to edit target RNA sequences residing in a cell of the infected eukaryotic host, or to edit a RNA sequence inside the cell of a pathogen residing or circulating in the eukaryotic host, as long as the cells where the editing is to take place contain an editing entity compatible with the oligonucleotide construct administered thereto.

[0174] Without wishing to be bound be theory, the RNA editing through ADAR1 and ADAR2 is thought to take place on pre-mRNAs in the nucleus, during transcription or splicing. Editing of mitochondrial RNA codons or non-coding sequences in mature mRNAs is not excluded.

[0175] Deamination of an adenosine using the oligonucleotides disclosed herein includes any level of adenosine deamination, e.g., at least 1 deaminated adenosine within a target sequence (e.g., at least, 1, 2, 3, or more deaminated adenosines in a target sequence).

[0176] Adenosine deamination may be assessed by a decrease in an absolute or relative level of adenosines within a target sequence compared with a control level. The control level may be any type of control level that is utilized in the art, e.g., pre-dose baseline level, or a level determined from a similar subject, cell, or sample that is untreated or treated with a control (such as, e.g., buffer only control or inactive agent control).

[0177] Because the enzymatic activity of ADAR converts adenosines to inosines, adenosine deamination can alternatively be assessed by an increase in an absolute or relative level of inosines within a target sequence compared with a control level. Similarly, the control level may be any type of control level that is utilized in the art, e.g., pre-dose baseline level, or a level determined from a similar subject, cell, or sample that is untreated or treated with a control (such as, e.g., buffer only control or inactive agent control).

[0178] The levels of adenosines and/or inosines within a target sequence can be assessed using any of the methods known in the art for determining the nucleotide composition of a polynucleotide sequence. For example, the relative or absolute levels of adenosines or inosines within a target sequence can be assessed using nucleic acid sequencing technologies including but not limited to Sanger sequencing methods, Next Generation Sequencing (NGS; e.g., pyrosequencing, sequencing by reversible terminator chemistry, sequencing by ligation, and real-time sequencing) such as those offered on commercially available platforms (e.g., Illumina, Qiagen, Pacific Biosciences, Thermo Fisher, Roche, and Oxford Nanopore Technologies). Clonal amplification of target sequences for NGS may be performed using real-time polymerase chain reaction (also known as qPCR) on commercially available platforms from Applied Biosystems, Roche, Stratagene, Cepheid, Eppendorf, or Bio-Rad Laboratories. Additionally or alternatively, emulsion PCR methods can be used for amplification of target sequences using commercially available platforms such as Droplet Digital PCR by Bio-Rad Laboratories.

[0179] In certain embodiments, surrogate markers can be used to detect adenosine deamination within a target sequence. For example, effective treatment of a subject having a genetic disorder involving G-to-A mutations with an oligonucleotide of the present disclosure, as demonstrated by an acceptable diagnostic and monitoring criteria can be understood to demonstrate a clinically relevant adenosine deamination. In certain embodiments, the methods include a clinically relevant adenosine deamination, e.g., as demonstrated by a clinically relevant outcome after treatment of a subject with an oligonucleotide of the present disclosure.

[0180] Adenosine deamination in a gene of interest may be manifested by an increase or decrease in the levels of mRNA expressed by a first cell or group of cells (such cells may be present, for example, in a sample derived from a subject) in which a gene of interest is transcribed and which has or have been treated (e.g., by contacting the cell or cells with an oligonucleotide of the present disclosure, or by administering an oligonucleotide of the invention to a subject in which the cells are or were present) such that the expression of the gene of interest is increased or decreased, as compared to a second cell or group of cells substantially identical to the first cell or group of cells but which has not or have not been so treated (control cell(s) not treated with an oligonucleotide or not treated with an oligonucleotide targeted to the gene of interest). The degree of increase or decrease in the levels of mRNA of a gene of interest may be expressed in terms of:

$$\frac{( mRNA in control cells ) - ( mRNA in treated cells )}{( mRNA in control cells )} \times 100 \%$$

[0181] In other embodiments, change in the levels of a gene may be assessed in terms of a reduction of a parameter that is functionally linked to the expression of a gene of interest, e.g., protein expression of the gene of interest or signaling downstream of the protein. A change in the levels of the gene of interest may be determined in any cell expressing the gene of interest, either endogenous or heterologous from an expression construct, and by any assay known in the art.

[0182] A change in the level of expression of a gene of interest may be manifested by an increase or decrease in the level of the protein produced by the gene of interest that is expressed by a cell or group of cells (e.g., the level of protein expressed in a sample derived from a subject). As explained above, for the assessment of mRNA suppression, the change in the level of protein expression in a treated cell or group of cells may similarly be expressed as a percentage of the level of protein in a control cell or group of cells.

[0183] A control cell or group of cells that may be used to assess the change in the expression of a gene of interest includes a cell or group of cells that has not yet been contacted with an oligonucleotide of the present disclosure. For example, the control cell or group of cells may be derived from an individual subject (e.g., a human or animal subject) prior to treatment of the subject with an oligonucleotide.

[0184] The level of mRNA of a gene of interest that is expressed by a cell or group of cells may be determined using any method known in the art for assessing mRNA expression. In one embodiment, the level of expression of a gene of interest in a sample is determined by detecting a transcribed polynucleotide, or portion thereof, e.g., mRNA of the gene of interest. RNA may be extracted from cells using RNA extraction techniques including, for example, using acid phenol/guanidine isothiocyanate extraction (RNAzol B; Biogenesis), RNEASY™ RNA preparation kits (Qiagen) or PAXgene (PreAnalytix, Switzerland). Typical assay formats utilizing ribonucleic acid hybridization include nuclear run-on assays, RT-PCR, RNase protection assays, northern blotting, in situ hybridization, and microarray analysis. Circulating mRNA of the gene of interest may be detected using methods the described in PCT Publication WO2012/177906, the entire contents of which are hereby incorporated herein by reference. In some embodiments, the level of expression of the gene of interest is determined using a nucleic acid probe. The term “probe,” as used herein, refers to any molecule that is capable of selectively binding to a specific sequence, e.g. to an mRNA or polypeptide. Probes can be synthesized by one of skill in the art, or derived from appropriate biological preparations. Probes may be specifically designed to be labeled. Examples of molecules that can be utilized as probes include, but are not limited to, RNA, DNA, proteins, antibodies, and organic molecules.

[0185] Isolated mRNA can be used in hybridization or amplification assays that include, but are not limited to, Southern or northern analyses, polymerase chain reaction (PCR) analyses, and probe arrays. One method for the determination of mRNA levels involves contacting the isolated mRNA with a nucleic acid molecule (probe) that can hybridize to the mRNA of a gene of interest. In one embodiment, the mRNA is immobilized on a solid surface and contacted with a probe, for example by running the isolated mRNA on an agarose gel and transferring the mRNA from the gel to a membrane, such as nitrocellulose. In an alternative embodiment, the probe(s) are immobilized on a solid surface and the mRNA is contacted with the probe(s), for example, in an AFFYMETRIX gene chip array. A skilled artisan can readily adapt known mRNA detection methods for use in determining the level of mRNA of a gene of interest.

[0186] An alternative method for determining the level of expression of a gene of interest in a sample involves the process of nucleic acid amplification and/or reverse transcriptase (to prepare cDNA) of for example mRNA in the sample, e.g., by RT-PCR (the experimental embodiment set forth in Mullis, 1987, U.S. Pat. No. 4,683,202), ligase chain reaction (Barany (1991) Proc. Natl. Acad. Sci. USA 88:189-193), self-sustained sequence replication (Guatelli et al. (1990) Proc. Natl. Acad. Sci. USA 87:1874-1878), transcriptional amplification system (Kwoh et al. (1989) Proc. Natl. Acad. Sci. USA 86:1173-1177), Q-Beta Replicase (Lizardi et al. (1988) Bio/Technology 6:1197), rolling circle replication (Lizardi et al., U.S. Pat. No. 5,854,033) or any other nucleic acid amplification method, followed by the detection of the amplified molecules using techniques well known to those of skill in the art. These detection schemes are especially useful for the detection of nucleic acid molecules if such molecules are present in very low numbers. In particular aspects of the invention, the level of expression of a gene of interest is determined by quantitative fluorogenic RT-PCR (i.e., the TAQMAN™ System) or the DUAL-GLO® Luciferase assay.

[0187] The expression levels of mRNA of a gene of interest may be monitored using a membrane blot (such as used in hybridization analysis such as northern, Southern, dot, and the like), or microwells, sample tubes, gels, beads or fibers (or any solid support including bound nucleic acids). See U.S. Pat. Nos. 5,770,722; 5,874,219; 5,744,305; 5,677,195; and 5,445,934, which are incorporated herein by reference. The determination of gene expression level may also include using nucleic acid probes in solution.

[0188] In some embodiments, the level of mRNA expression is assessed using branched DNA (bDNA) assays or real time PCR (qPCR). The use of this PCR method is described and exemplified in the Examples presented herein. Such methods can also be used for the detection of nucleic acids of the gene of interest.

[0189] The level of protein produced by the expression of a gene of interest may be determined using any method known in the art for the measurement of protein levels. Such methods include, for example, electrophoresis, capillary electrophoresis, high performance liquid chromatography (HPLC), thin layer chromatography (TLC), hyperdiffusion chromatography, fluid or gel precipitin reactions, absorption spectroscopy, a colorimetric assays, spectrophotometric assays, flow cytometry, immunodiffusion (single or double), immunoelectrophoresis, western blotting, radioimmunoassay (RIA), enzyme-linked immunosorbent assays (ELISAs), immunofluorescent assays, electrochemiluminescence assays, and the like. Such assays can also be used for the detection of proteins indicative of the presence or replication of proteins produced by the gene of interest. Additionally, the above assays may be used to report a change in the mRNA sequence of interest that results in the recovery or change in protein function thereby providing a therapeutic effect and benefit to the subject, treating a disorder in a subject, and/or reducing of symptoms of a disorder in the subject.

### Methods of Treatment

[0190] The present invention also include methods of treating or preventing an LRRK2-associated disease or disorder, e.g., Parkinson's Disease. For example, the methods of the invention may be used to treat or prevent any LRRK2-associated disorders which may be caused by a guanosine to adenosine mutation, the introduction of a premature stop codon, or expression of an undesired protein. In some embodiments, the oligonucleotides for use in the methods of the invention, when introduced to a cell or a subject, can result in correction of a guanosine to adenosine mutation. In some embodiments, the oligonucleotides for use in the methods of the invention can result in turning off of a premature stop codon so that a desired protein is expressed. In some embodiments, the oligonucleotides for use in the methods of the invention can result in inhibition of expression of an undesired protein.

[0191] In one aspect, the present invention is directed to a method of treating Parkinson's Disease (PD) in a subject in need thereof. The method comprises identifying a subject with a single nucleotide polymorphism (SNP) associated with PD in an LRRK2 polynucleotide; and contacting the LRRK2 polynucleotide in a cell of the subject with a guide oligonucleotide capable of effecting an adenosine deaminase acting on RNA (ADAR)-mediated adenosine to inosine alteration of the SNP associated with PD, thereby treating the subject.

[0192] In another aspect, the present invention is directed to a method of treating Parkinson's Disease (PD) in a subject in need thereof. The method comprises identifying a subject with a single nucleotide polymorphism (SNP) associated with PD in an LRRK2 polynucleotide; contacting the LRRK2 polynucleotide in a cell with a guide oligonucleotide capable of effecting an adenosine deaminase acting on RNA (ADAR)-mediated adenosine to inosine alteration of the SNP associated with PD, and administering the cell to the subject, thereby treating the subject.

[0193] In some embodiments, the subject is a human subject. In some embodiments, the subject is being treated prior to disease symptoms. In other embodiments, the subject is being treated after developing disease symptoms and/or being identified as carrying a single nucleotide polymorphism (SNP) associated with PD in an LRRK2 polynucleotide.

[0194] The methods of the invention thus may include a step of identifying a subject with a single nucleotide polymorphism (SNP) associated with PD in an LRRK2 polynucleotide. Specifically, the methods of the invention include a step of identifying the presence of the desired nucleotide change or SNPs in the target RNA sequence, thereby verifying that the target RNA sequence has the disease causing mutations to be corrected or edited. This step will typically involve sequencing of the relevant part of the target RNA sequence, or a cDNA copy thereof (or a cDNA copy of a splicing product thereof, in case the target RNA is a pre-mRNA), and the sequence change can thus be easily verified. Alternatively the modifications may be assessed on the level of the protein (length, glycosylation, function or the like), or by some functional read-out.

[0195] The methods disclosed herein also include contacting the LRRK2 polynucleotides with a single nucleotide polymorphism (SNP) associated with PD in a cell or a subject (including a subject identified as being in need of such treatment, or a subject suspected of being at risk of disease and in need of such treatment) with a guide oligonucleotide capable of effecting an adenosine deaminase acting on RNA (ADAR)-mediated adenosine to inosine alteration of the SNP associated with PD, as described herein.

[0196] The guide oligonucleotides for use in the methods of the invention are designed to specifically target the LRRK2 gene of a subject (e.g., a human patient) in need thereof, and are capable of effecting an ADAR-mediated adenosine to inosine alteration in the SNPs associated with PD in the LRRK2 gene. In some embodiments, the guide oligonucleotides are capable of recruiting the ADAR to the target mRNA, which then catalyze deamination of target adenosines in the target mRNA. Such treatment will be suitably introduced to a subject, particularly a human subject, suffering from, having, susceptible to, or at risk for developing PD. The compositions disclosed herein may be also used in the treatment of any other disorders in which PD may be implicated.

[0197] In one embodiment, the invention provides a method of monitoring treatment progress. The method includes the step of determining a level of diagnostic marker (Marker) (e.g., SNP associated with PD) or diagnostic measurement (e.g., screen, assay) in a subject suffering from or susceptible to developing PD, or symptoms associated with PD in which the subject has been administered a therapeutic amount of a composition disclosed herein sufficient to treat the disease or symptoms thereof. The level of Marker determined in the method can be compared to known levels of Marker in either healthy normal controls or in other afflicted patients to establish the subject's disease status. In preferred embodiments, a second level of Marker in the subject is determined at a time point later than the determination of the first level, and the two levels are compared to monitor the course of disease or the efficacy of the therapy. In certain preferred embodiments, a pre-treatment level of Marker in the subject is determined prior to beginning treatment according to this invention; this pre-treatment level of Marker can then be compared to the level of Marker in the subject after the treatment commences, to determine the efficacy of the treatment.

[0198] In some embodiments, cells are obtained from the subject and contacted with an oligonucleotide composition of the invention as provided herein. In some embodiments, the cell is autologous, allogenic, or xenogenic to the subject. In some embodiments, cells removed from a subject and contacted ex vivo with an oligonucleotide composition of the invention are re-introduced into the subject, optionally after the desired genomic modification has been effected or detected in the cells.

[0199] In some embodiments, the oligonucleotide for use in the methods of the present disclosure is introduced to a subject such that the oligonucleotide is delivered to a specific site within the subject. The change in the expression of the gene of interest may be assessed using measurements of the level or change in the level of mRNA or protein produced by the gene of interest in a sample derived from a specific site within the subject.

[0200] In other embodiments, the oligonucleotide is introduced into the cell or the subject in an amount and for a time effective to result in one of (or more, e.g., two or more, three or more, four or more of: (a) decrease the number of adenosines within a target sequence of the gene of interest, (b) decrease the number of pathogenic mutations in the target protein, e.g., LRRK2, (c) delayed onset of Parkinson's Disease, (d) increased survival of subject, (e) recovery or change in protein function, and (f) reduction in one or more of symptoms related to Parkinson's Disease, such as bradykinesia, resting tremor, muscle rigidity or stiffness of the limbs, e.g., the arms, shoulders of neck; gradual loss of spontaneous and/or automatic movement, unsteady walk or balance, depression or dementia, and other neuropsychiatric issues or cognitive dysfunction.

[0201] Treating disorders associated with G-to-A mutations can also result in a decrease in the mortality rate of a population of treated subjects in comparison to an untreated population. For example, the mortality rate is decreased by more than 2% (e.g., more than 5%, 10%, or 25%). A decrease in the mortality rate of a population of treated subjects may be measured by any reproducible means, for example, by calculating for a population the average number of disease-related deaths per unit time following initiation of treatment with a compound or pharmaceutically acceptable salt of a compound described herein. A decrease in the mortality rate of a population may also be measured, for example, by calculating for a population the average number of disease-related deaths per unit time following completion of a first round of treatment with a compound or pharmaceutically acceptable salt of a compound described herein.

[0202] A. Methods of Administration

[0203] The delivery of an oligonucleotide for use in the methods of the invention to a cell e.g., a cell within a subject, such as a human subject (e.g., a subject in need thereof, such as a subject having a Parkinson's Disease) can be achieved in a number of different ways. For example, delivery may be performed by contacting a cell with an oligonucleotide of the invention either in vitro or in vivo. In vivo delivery may also be performed directly by administering a composition including an oligonucleotide to a subject. Alternatively, in vivo delivery may be performed indirectly by administering one or more vectors that encode and direct the expression of the oligonucleotide. Combinations of in vitro and in vivo methods of contacting a cell are also possible. Contacting a cell may be direct or indirect. Furthermore, contacting a cell may be accomplished via a targeting ligand, including any ligand described herein or known in the art. In some embodiments, the targeting ligand is a carbohydrate moiety, e.g., a GalNAc3 ligand, or any other ligand that directs the oligonucleotide to a site of interest, for example, the central nervous system, such as, the midbrain, e.g., the substantia nigra; the striatum; the brainstem; the cortex; or the forebrain, e.g., the olfactory bulb.

[0204] Contacting of a cell with an oligonucleotide may be done in vitro or in vivo. Known methods can be adapted for use with an oligonucleotide of the invention (see e.g., Akhtar S. and Julian R L., (1992) Trends Cell. Biol. 2(5):139-144 and WO94/02595, which are incorporated herein by reference in their entireties). For in vivo delivery, factors to consider in order to deliver an oligonucleotide molecule include, for example, biological stability of the delivered molecule, prevention of non-specific effects, and accumulation of the delivered molecule in the target tissue. The non-specific effects of an oligonucleotide can be minimized by local administration, for example, by direct injection or implantation into a tissue or topically administering the preparation. Local administration to a treatment site maximizes local concentration of the agent, limits the exposure of the agent to systemic tissues that can otherwise be harmed by the agent or that can degrade the agent, and permits a lower total dose of the oligonucleotide molecule to be administered.

[0205] For administering an oligonucleotide systemically for the treatment of a disease, the oligonucleotide can include alternative nucleobases, alternative sugar moieties, and/or alternative internucleoside linkages, or alternatively delivered using a drug delivery system; both methods act to prevent the rapid degradation of the oligonucleotide by endo- and exo-nucleases in vivo. Modification of the oligonucleotide or the pharmaceutical carrier can also permit targeting of the oligonucleotide composition to the target tissue and avoid undesirable off-target effects. Oligonucleotide molecules can be modified by chemical conjugation to lipophilic groups such as cholesterol to enhance cellular uptake and prevent degradation. In an alternative embodiment, the oligonucleotide can be delivered using drug delivery systems such as a nanoparticle, a lipid nanoparticle, a polyplex nanoparticle, a lipoplex nanoparticle, a dendrimer, a polymer, liposomes, or a cationic delivery system. Positively charged cationic delivery systems facilitate binding of an oligonucleotide molecule (negatively charged) and also enhance interactions at the negatively charged cell membrane to permit efficient uptake of an oligonucleotide by the cell. Cationic lipids, dendrimers, or polymers can either be bound to an oligonucleotide, or induced to form a vesicle or micelle that encases an oligonucleotide. The formation of vesicles or micelles further prevents degradation of the oligonucleotide when administered systemically. In general, any methods of delivery of nucleic acids known in the art may be adaptable to the delivery of the oligonucleotides of the invention. Methods for making and administering cationic oligonucleotide complexes are well within the abilities of one skilled in the art (see e.g., Sorensen, D R., et al. (2003) J. Mol. Biol 327:761-766; Verma, U N. et al., (2003) Clin. Cancer Res. 9:1291-1300; Arnold, A S et al., (2007) J. Hypertens. 25:197-205, which are incorporated herein by reference in their entirety). Some non-limiting examples of drug delivery systems useful for systemic delivery of oligonucleotides include DOTAP (Sorensen, D R., et al (2003), supra; Verma, U N. et al., (2003), supra), Oligofectamine, “solid nucleic acid lipid particles” (Zimmermann, T S. et al., (2006) Nature 441:111-114), cardiolipin (Chien, P Y. et al., (2005) Cancer Gene Ther. 12:321-328; Pal, A. et al., (2005) Int J. Oncol. 26:1087-1091), polyethyleneimine (Bonnet M E. et al., (2008) Pharm. Res. August 16 Epub ahead of print; Aigner, A. (2006) J. Biomed. Biotechnol. 71659), Arg-Gly-Asp (RGD) peptides (Liu, S. (2006) Mol. Pharm. 3:472-487), and polyamidoamines (Tomalia, D A. et al., (2007) Biochem. Soc. Trans. 35:61-67; Yoo, H. et al., (1999) Pharm. Res. 16:1799-1804). In some embodiments, an oligonucleotide forms a complex with cyclodextrin for systemic administration. Methods for administration and pharmaceutical compositions of oligonucleotides and cyclodextrins can be found in U.S. Pat. No. 7,427,605, which is herein incorporated by reference in its entirety. In some embodiments the oligonucleotides of the invention are delivered by polyplex or lipoplex nanoparticles. Methods for administration and pharmaceutical compositions of oligonucleotides and polyplex nanoparticles and lipoplex nanoparticles can be found in U.S. Patent Application Nos. 2017/0121454; 2016/0369269; 2016/0279256; 2016/0251478; 2016/0230189; 2015/0335764; 2015/0307554; 2015/0174549; 2014/0342003; 2014/0135376; and 2013/0317086, which are herein incorporated by reference in their entirety.

[0206] i. Membranous Molecular Assembly Delivery Methods

[0207] Oligonucleotides for use in the methods of the invention can also be delivered using a variety of membranous molecular assembly delivery methods including polymeric, biodegradable microparticle, or microcapsule delivery devices known in the art. For example, a colloidal dispersion system may be used for targeted delivery an oligonucleotide agent described herein. Colloidal dispersion systems include macromolecule complexes, nanocapsules, microspheres, beads, and lipid-based systems including oil-in-water emulsions, micelles, mixed micelles, and liposomes. Liposomes are artificial membrane vesicles that are useful as delivery vehicles in vitro and in vivo. It has been shown that large unilamellar vesicles (LUV), which range in size from 0.2-4.0 μm can encapsulate a substantial percentage of an aqueous buffer containing large macromolecules. Liposomes are useful for the transfer and delivery of active ingredients to the site of action. Because the liposomal membrane is structurally similar to biological membranes, when liposomes are applied to a tissue, the liposomal bilayer fuses with bilayer of the cellular membranes. As the merging of the liposome and cell progresses, the internal aqueous contents that include the oligonucleotide are delivered into the cell where the oligonucleotide can specifically bind to a target RNA and can mediate ADAR-mediated RNA editing. In some cases, the liposomes are also specifically targeted, e.g., to direct the oligonucleotide to particular cell types. The composition of the liposome is usually a combination of phospholipids, usually in combination with steroids, especially cholesterol. Other phospholipids or other lipids may also be used. The physical characteristics of liposomes depend on pH, ionic strength, and the presence of divalent cations.

[0208] A liposome containing an oligonucleotide can be prepared by a variety of methods. In one example, the lipid component of a liposome is dissolved in a detergent so that micelles are formed with the lipid component. For example, the lipid component can be an amphipathic cationic lipid or lipid conjugate. The detergent can have a high critical micelle concentration and may be nonionic. Exemplary detergents include cholate, CHAPS, octylglucoside, deoxycholate, and lauroyl sarcosine. The oligonucleotide preparation is then added to the micelles that include the lipid component. The cationic groups on the lipid interact with the oligonucleotide and condense around the oligonucleotide to form a liposome. After condensation, the detergent is removed, e.g., by dialysis, to yield a liposomal preparation of oligonucleotide.

[0209] If necessary, a carrier compound that assists in condensation can be added during the condensation reaction, e.g., by controlled addition. For example, the carrier compound can be a polymer other than a nucleic acid (e.g., spermine or spermidine). The pH can also be adjusted to favor condensation.

[0210] Methods for producing stable polynucleotide delivery vehicles, which incorporate a polynucleotide/cationic lipid complex as a structural component of the delivery vehicle, are further described in, e.g., WO 96/37194, the entire contents of which are incorporated herein by reference. Liposome formation can also include one or more aspects of exemplary methods described in Feigner, P. L. et al., (1987) Proc. Natl. Acad. Sci. USA 8:7413-7417; U.S. Pat. Nos. 4,897,355; 5,171,678; Bangham et al., (1965) M. Mol. Biol. 23:238; Olson et al., (1979) Biochim. Biophys. Acta 557:9; Szoka et al., (1978) Proc. Natl. Acad. Sci. 75: 4194; Mayhew et al., (1984) Biochim. Biophys. Acta 775:169; Kim et al., (1983) Biochim. Biophys. Acta 728:339; and Fukunaga et al., (1984) Endocrinol. 115:757. Commonly used techniques for preparing lipid aggregates of appropriate size for use as delivery vehicles include sonication and freeze-thaw plus extrusion (see, e.g., Mayer et al., (1986) Biochim. Biophys. Acta 858:161. Microfluidization can be used when consistently small (50 to 200 nm) and relatively uniform aggregates are desired (Mayhew et al., (1984) Biochim. Biophys. Acta 775:169. These methods are readily adapted to packaging oligonucleotide preparations into liposomes.

[0211] Liposomes fall into two broad classes. Cationic liposomes are positively charged liposomes which interact with the negatively charged nucleic acid molecules to form a stable complex. The positively charged nucleic acid/liposome complex binds to the negatively charged cell surface and is internalized in an endosome. Due to the acidic pH within the endosome, the liposomes are ruptured, releasing their contents into the cell cytoplasm (Wang et al. (1987) Biochem. Biophys. Res. Commun., 147:980-985).

[0212] Liposomes, which are pH-sensitive or negatively charged, entrap nucleic acids rather than complex with them. Since both the nucleic acid and the lipid are similarly charged, repulsion rather than complex formation occurs. Nevertheless, some nucleic acid is entrapped within the aqueous interior of these liposomes. pH sensitive liposomes have been used to deliver nucleic acids encoding the thymidine kinase gene to cell monolayers in culture. Expression of the exogenous gene was detected in the target cells (Zhou et al. (1992) Journal of Controlled Release, 19:269-274).

[0213] One major type of liposomal composition includes phospholipids other than naturally-derived phosphatidylcholine. Neutral liposome compositions, for example, can be formed from dimyristoyl phosphatidylcholine (DMPC) or dipalmitoyl phosphatidylcholine (DPPC). Anionic liposome compositions generally are formed from dimyristoyl phosphatidylglycerol, while anionic fusogenic liposomes are formed primarily from dioleoyl phosphatidylethanolamine (DOPE). Another type of liposomal composition is formed from phosphatidylcholine (PC) such as, for example, soybean PC, and egg PC. Another type is formed from mixtures of phospholipid and/or phosphatidylcholine and/or cholesterol.

[0214] Examples of other methods to introduce liposomes into cells in vitro and in vivo include U.S. Pat. Nos. 5,283,185; 5,171,678; WO 94/00569; WO 93/24640; WO 91/16024; Feigner, (1994) J. Biol. Chem. 269:2550; Nabel, (1993) Proc. Natl. Acad. Sci. 90:11307; Nabel, (1992) Human Gene Ther. 3:649; Gershon, (1993) Biochem. 32:7143; and Strauss, (1992) EMBO J. 11:417.

[0215] Non-ionic liposomal systems have also been examined to determine their utility in the delivery of drugs to the skin, in particular systems including non-ionic surfactant and cholesterol. Non-ionic liposomal formulations including NOVASOME™ I (glyceryl dilaurate/cholesterol/polyoxyethylene-10-stearyl ether) and NOVASOME™ II (glyceryl distearate/cholesterol/polyoxyethylene-10-stearyl ether) were used to deliver cyclosporin-A into the dermis of mouse skin. Results indicated that such non-ionic liposomal systems were effective in facilitating the deposition of cyclosporine A into different layers of the skin (Hu et al., (1994) S.T.P. Pharma. Sci., 4(6):466).

[0216] Liposomes may also be sterically stabilized liposomes, including one or more specialized lipids that result in enhanced circulation lifetimes relative to liposomes lacking such specialized lipids. Examples of sterically stabilized liposomes are those in which part of the vesicle-forming lipid portion of the liposome (A) includes one or more glycolipids, such as monosialoganglioside G_{M1}, or (B) is derivatized with one or more hydrophilic polymers, such as a polyethylene glycol (PEG) moiety. While not wishing to be bound by any particular theory, it is thought in the art that, at least for sterically stabilized liposomes containing gangliosides, sphingomyelin, or PEG-derivatized lipids, the enhanced circulation half-life of these sterically stabilized liposomes derives from a reduced uptake into cells of the reticuloendothelial system (RES) (Allen et al., (1987) FEBS Letters, 223:42; Wu et al., (1993) Cancer Research, 53:3765).

[0217] Various liposomes including one or more glycolipids are known in the art. Papahadjopoulos et al. (Ann. N.Y. Acad. Sci., (1987), 507:64) reported the ability of monosialoganglio side G^{M1}, galactocerebroside sulfate, and phosphatidylinositol to improve blood half-lives of liposomes. These findings were expounded upon by Gabizon et al. (Proc. Natl. Acad. Sci. U.S.A., (1988), 85:6949). U.S. Pat. No. 4,837,028 and WO 88/04924, both to Allen et al., disclose liposomes including (1) sphingomyelin and (2) the ganglioside G_{M1} or a galactocerebroside sulfate ester. U.S. Pat. No. 5,543,152 (Webb et al.) discloses liposomes including sphingomyelin. Liposomes including 1,2-sn-dimyristoylphosphatidylcholine are disclosed in WO 97/13499 (Lim et al).

[0218] In one embodiment, cationic liposomes are used. Cationic liposomes possess the advantage of being able to fuse to the cell membrane. Non-cationic liposomes, although not able to fuse as efficiently with the plasma membrane, are taken up by macrophages in vivo and can be used to deliver oligonucleotides to macrophages.

[0219] Further advantages of liposomes include: liposomes obtained from natural phospholipids are biocompatible and biodegradable; liposomes can incorporate a wide range of water and lipid soluble drugs; liposomes can protect encapsulated oligonucleotides in their internal compartments from metabolism and degradation (Rosoff, in “Pharmaceutical Dosage Forms,” Lieberman, Rieger and Banker (Eds.), 1988, volume 1, p. 245). Important considerations in the preparation of liposome formulations are the lipid surface charge, vesicle size and the aqueous volume of the liposomes.

[0220] A positively charged synthetic cationic lipid, N-[1-(2,3-dioleyloxy)propyl]-N,N,N-trimethylammonium chloride (DOTMA) can be used to form small liposomes that interact spontaneously with nucleic acid to form lipid-nucleic acid complexes which are capable of fusing with the negatively charged lipids of the cell membranes of tissue culture cells, resulting in delivery of oligonucleotides (see, e.g., Feigner, P. L. et al., (1987) Proc. Natl. Acad. Sci. USA 8:7413-7417, and U.S. Pat. No. 4,897,355 for a description of DOTMA and its use with DNA).

[0221] A DOTMA analogue, 1,2-bis(oleoyloxy)-3-(trimethylammonia)propane (DOTAP) can be used in combination with a phospholipid to form DNA-complexing vesicles. LIPOFECTIN™ Bethesda Research Laboratories, Gaithersburg, Md.) is an effective agent for the delivery of highly anionic nucleic acids into living tissue culture cells that include positively charged DOTMA liposomes which interact spontaneously with negatively charged polynucleotides to form complexes. When enough positively charged liposomes are used, the net charge on the resulting complexes is also positive. Positively charged complexes prepared in this way spontaneously attach to negatively charged cell surfaces, fuse with the plasma membrane, and efficiently deliver functional nucleic acids into, for example, tissue culture cells. Another commercially available cationic lipid, 1,2-bis(oleoyloxy)-3,3-(trimethylammonia)propane (“DOTAP”) (Boehringer Mannheim, Indianapolis, Ind.) differs from DOTMA in that the oleoyl moieties are linked by ester, rather than ether linkages.

[0222] Other reported cationic lipid compounds include those that have been conjugated to a variety of moieties including, for example, carboxyspermine which has been conjugated to one of two types of lipids and includes compounds such as 5-carboxyspermylglycine dioctaoleoylamide (“DOGS”) (TRANSFECTAM™, Promega, Madison, Wis.) and dipalmitoylphosphatidylethanolamine 5-carboxyspermyl-amide (“DPPES”) (see, e.g., U.S. Pat. No. 5,171,678).

[0223] Another cationic lipid conjugate includes derivatization of the lipid with cholesterol (“DC-Chol”) which has been formulated into liposomes in combination with DOPE (See, Gao, X. and Huang, L., (1991) Biochim. Biophys. Res. Commun. 179:280). Lipopolylysine, made by conjugating polylysine to DOPE, has been reported to be effective for transfection in the presence of serum (Zhou, X. et al., (1991) Biochim. Biophys. Acta 1065:8). For certain cell lines, these liposomes containing conjugated cationic lipids, are said to exhibit lower toxicity and provide more efficient transfection than the DOTMA-containing compositions. Other commercially available cationic lipid products include DMRIE and DMRIE-HP (Vical, La Jolla, Calif.) and Lipofectamine (DOSPA) (Life Technology, Inc., Gaithersburg, Md.). Other cationic lipids suitable for the delivery of oligonucleotides are described in WO 98/39359 and WO 96/37194.

[0224] Liposomal formulations are particularly suited for topical administration, liposomes present several advantages over other formulations. Such advantages include reduced side effects related to high systemic absorption of the administered drug, increased accumulation of the administered drug at the desired target, and the ability to administer oligonucleotides into the skin. In some implementations, liposomes are used for delivering oligonucleotides to epidermal cells and also to enhance the penetration of oligonucleotides into dermal tissues, e.g., into skin. For example, the liposomes can be applied topically. Topical delivery of drugs formulated as liposomes to the skin has been documented (see, e.g., Weiner et al., (1992) Journal of Drug Targeting, vol. 2, 405-410 and du Plessis et al., (1992) Antiviral Research, 18:259-265; Mannino, R. J. and Fould-Fogerite, S., (1998) Biotechniques 6:682-690; Itani, T. et al., (1987) Gene 56:267-276; Nicolau, C. et al. (1987) Meth. Enzymol. 149:157-176; Straubinger, R. M. and Papahadjopoulos, D. (1983) Meth. Enzymol. 101:512-527; Wang, C. Y. and Huang, L., (1987) Proc. Natl. Acad. Sci. USA 84:7851-7855).

[0225] Non-ionic liposomal systems have also been examined to determine their utility in the delivery of drugs to the skin, in particular systems including non-ionic surfactant and cholesterol. Non-ionic liposomal formulations including Novasome I (glyceryl dilaurate/cholesterol/polyoxyethylene-10-stearyl ether) and Novasome II (glyceryl distearate/cholesterol/polyoxyethylene-10-stearyl ether) were used to deliver a drug into the dermis of mouse skin. Such formulations with oligonucleotide are useful for treating a dermatological disorder.

[0226] The targeting of liposomes is also possible based on, for example, organ-specificity, cell-specificity, and organelle-specificity and is known in the art. In the case of a liposomal targeted delivery system, lipid groups can be incorporated into the lipid bilayer of the liposome in order to maintain the targeting ligand in stable association with the liposomal bilayer. Various linking groups can be used for joining the lipid chains to the targeting ligand. Additional methods are known in the art and are described, for example in U.S. Patent Application Publication No. 20060058255, the linking groups of which are herein incorporated by reference.

[0227] Liposomes that include oligonucleotides can be made highly deformable. Such deformability can enable the liposomes to penetrate through pore that are smaller than the average radius of the liposome. For example, transfersomes are yet another type of liposomes, and are highly deformable lipid aggregates which are attractive candidates for drug delivery vehicles. Transfersomes can be described as lipid droplets which are so highly deformable that they are easily able to penetrate through pores which are smaller than the droplet. Transfersomes can be made by adding surface edge activators, usually surfactants, to a standard liposomal composition. Transfersomes that include oligonucleotides can be delivered, for example, subcutaneously by infection in order to deliver oligonucleotides to keratinocytes in the skin. In order to cross intact mammalian skin, lipid vesicles must pass through a series of fine pores, each with a diameter less than 50 nm, under the influence of a suitable transdermal gradient. In addition, due to the lipid properties, these transfersomes can be self-optimizing (adaptive to the shape of pores, e.g., in the skin), self-repairing, and can frequently reach their targets without fragmenting, and often self-loading. Transfersomes have been used to deliver serum albumin to the skin. The transfersome-mediated delivery of serum albumin has been shown to be as effective as subcutaneous injection of a solution containing serum albumin.

[0228] Other formulations amenable to the present invention are described in U.S. provisional application Ser. No. 61/018,616, filed Jan. 2, 2008; 61/018,611, filed Jan. 2, 2008; 61/039,748, filed Mar. 26, 2008; 61/047,087, filed Apr. 22, 2008 and 61/051,528, filed May 8, 2008. PCT application No. PCT/US2007/080331, filed Oct. 3, 2007 also describes formulations that are amenable to the present invention.

[0229] Surfactants find wide application in formulations such as emulsions (including microemulsions) and liposomes. The most common way of classifying and ranking the properties of the many different types of surfactants, both natural and synthetic, is by the use of the hydrophile/lipophile balance (HLB). The nature of the hydrophilic group (also known as the “head”) provides the most useful means for categorizing the different surfactants used in formulations (Rieger, in Pharmaceutical Dosage Forms, Marcel Dekker, Inc., New York, N.Y., 1988, p. 285).

[0230] If the surfactant molecule is not ionized, it is classified as a nonionic surfactant. Nonionic surfactants find wide application in pharmaceutical and cosmetic products and are usable over a wide range of pH values. In general, their HLB values range from 2 to about 18 depending on their structure. Nonionic surfactants include nonionic esters such as ethylene glycol esters, propylene glycol esters, glyceryl esters, polyglyceryl esters, sorbitan esters, sucrose esters, and ethoxylated esters. Nonionic alkanolamides and ethers such as fatty alcohol ethoxylates, propoxylated alcohols, and ethoxylated/propoxylated block polymers are also included in this class. The polyoxyethylene surfactants are the most popular members of the nonionic surfactant class.

[0231] If the surfactant molecule carries a negative charge when it is dissolved or dispersed in water, the surfactant is classified as anionic. Anionic surfactants include carboxylates such as soaps, acyl lactylates, acyl amides of amino acids, esters of sulfuric acid such as alkyl sulfates and ethoxylated alkyl sulfates, sulfonates such as alkyl benzene sulfonates, acyl isethionates, acyl taurates and sulfosuccinates, and phosphates. The most important members of the anionic surfactant class are the alkyl sulfates and the soaps.

[0232] If the surfactant molecule carries a positive charge when it is dissolved or dispersed in water, the surfactant is classified as cationic. Cationic surfactants include quaternary ammonium salts and ethoxylated amines. The quaternary ammonium salts are the most used members of this class.

[0233] If the surfactant molecule has the ability to carry either a positive or negative charge, the surfactant is classified as amphoteric. Amphoteric surfactants include acrylic acid derivatives, substituted alkylamides, N-alkylbetaines, and phosphatides.

[0234] The use of surfactants in drug products, formulations and in emulsions has been reviewed (Rieger, in Pharmaceutical Dosage Forms, Marcel Dekker, Inc., New York, N.Y., 1988, p. 285).

[0235] The oligonucleotide for use in the methods of the invention can also be provided as micellar formulations. Micelles are a particular type of molecular assembly in which amphipathic molecules are arranged in a spherical structure such that all the hydrophobic portions of the molecules are directed inward, leaving the hydrophilic portions in contact with the surrounding aqueous phase. The converse arrangement exists if the environment is hydrophobic.

[0236] ii. Lipid Nanoparticle-Based Delivery Methods

[0237] Oligonucleotides for use in the methods of in the invention may be fully encapsulated in a lipid formulation, e.g., a lipid nanoparticle (LNP), or other nucleic acid-lipid particles. LNPs are extremely useful for systemic applications, as they exhibit extended circulation lifetimes following intravenous (i.v.) injection and accumulate at distal sites (e.g., sites physically separated from the administration site). LNPs include “pSPLP,” which include an encapsulated condensing agent-nucleic acid complex as set forth in PCT Publication No. WO 00/03683. The particles of the present invention typically have a mean diameter of about 50 nm to about 150 nm, more typically about 60 nm to about 130 nm, more typically about 70 nm to about 110 nm, most typically about 70 nm to about 90 nm, and are substantially nontoxic. In addition, the nucleic acids when present in the nucleic acid-lipid particles of the present invention are resistant in aqueous solution to degradation with a nuclease. Nucleic acid-lipid particles and their method of preparation are disclosed in, e.g., U.S. Pat. Nos. 5,976,567; 5,981,501; 6,534,484; 6,586,410; 6,815,432; U.S. Publication No. 2010/0324120 and PCT Publication No. WO 96/40964.

[0238] In one embodiment, the lipid to drug ratio (mass/mass ratio) (e.g., lipid to oligonucleotide ratio) will be in the range of from about 1:1 to about 50:1, from about 1:1 to about 25:1, from about 3:1 to about 15:1, from about 4:1 to about 10:1, from about 5:1 to about 9:1, or about 6:1 to about 9:1. Ranges intermediate to the above recited ranges are also contemplated to be part of the invention.

[0239] Non-limiting examples of cationic lipid include N,N-dioleyl-N,N-dimethylammonium chloride (DODAC), N,N-distearyl-N,N-dimethylammonium bromide (DDAB), N-(I-(2,3-dioleoyloxy)propyl)-N,N,N-trimethylammonium chloride (DOTAP), N-(I-(2,3-dioleyloxy)propyl)-N,N,N-trimethylammonium chloride (DOTMA), N,N-dimethyl-2,3-dioleyloxy)propylamine (DODMA), 1,2-DiLinoleyloxy-N,N-dimethylaminopropane (DLinDMA), 1,2-Dilinolenyloxy-N,N-dimethylaminopropane (DLenDMA), 1,2-Dilinoleylcarbamoyloxy-3-dimethylaminopropane (DLin-C-DAP), 1,2-Dilinoleyoxy-3-(dimethylamino)acetoxypropane (DLin-DAC), 1,2-Dilinoleyoxy-3-morpholinopropane (DLin-MA), 1,2-Dilinoleoyl-3-dimethylaminopropane (DLinDAP), 1,2-Dilinoleylthio-3-dimethylaminopropane (DLin-S-DMA), 1-Linoleoyl-2-linoleyloxy-3-dimethylaminopropane (DLin-2-DMAP), 1,2-Dilinoleyloxy-3-trimethylaminopropane chloride salt (DLin-TMA.Cl), 1,2-Dilinoleoyl-3-trimethylaminopropane chloride salt (DLin-TAP.Cl), 1,2-Dilinoleyloxy-3-(N-methylpiperazino)propane (DLin-MPZ), or 3-(N,N-Dilinoleylamino)-1,2-propanediol (DLinAP), 3-(N,N-Dioleylamino)-1,2-propanedio (DOAP), 1,2-Dilinoleyloxo-3-(2-N,N-dimethylamino)ethoxypropane (DLin-EG-DMA), 1,2-Dilinolenyloxy-N,N-dimethylaminopropane (DLinDMA), 2,2-Dilinoleyl-4-dimethylaminomethyl-[1,3]-dioxolane (DLin-K-DMA) or analogs thereof, (3aR,5s,6aS)-N,N-dimethyl-2,2-di((9Z,12Z)-octadeca-9,12-dienyetetrahydro-3aH-cyclopenta[d][1,3]dioxol-5-amine (ALN100), (6Z,9Z,28Z,31Z)-heptatriaconta-6,9,28,31-tetraen-19-yl4-(dimethylamino)bu-tanoate (MC3), 1,1′-(2-(4-(2-((2-(bis(2-hydroxydodecyl)amino)ethyl)(2-hydroxydodecyl)ami-no)ethyl)piperazin-1-yeethylazanediyedidodecan-2-ol (Tech G1), or a mixture thereof. The cationic lipid can include, for example, from about 20 mol % to about 50 mol % or about 40 mol % of the total lipid present in the particle.

[0240] The ionizable/non-cationic lipid can be an anionic lipid or a neutral lipid including, but not limited to, distearoylphosphatidylcholine (DSPC), dioleoylphosphatidylcholine (DOPC), dipalmitoylphosphatidylcholine (DPPC), dioleoylphosphatidylglycerol (DOPG), dipalmitoylphosphatidylglycerol (DPPG), dioleoyl-phosphatidylethanolamine (DOPE), palmitoyloleoylphosphatidylcholine (POPC), palmitoyloleoylphosphatidylethanolamine (POPE), dioleoyl-phosphatidylethanolamine 4-(N-maleimidomethyl)-cyclohexane-1-carboxylate (DOPE-mal), dipalmitoyl phosphatidyl ethanolamine (DPPE), dimyristoylphosphoethanolamine (DMPE), distearoyl-phosphatidyl-ethanolamine (DSPE), 16-O-monomethyl PE, 16-O-dimethyl PE, 18-1-trans PE, 1-stearoyl-2-oleoyl-phosphatidyethanolamine (SOPE), cholesterol, or a mixture thereof. The non-cationic lipid can be, for example, from about 5 mol % to about 90 mol %, about 10 mol %, or about 58 mol % if cholesterol is included, of the total lipid present in the particle.

[0241] The conjugated lipid that inhibits aggregation of particles can be, for example, a polyethyleneglycol (PEG)-lipid including, without limitation, a PEG-diacylglycerol (DAG), a PEG-dialkyloxypropyl (DAA), a PEG-phospholipid, a PEG-ceramide (Cer), or a mixture thereof. The PEG-DAA conjugate can be, for example, a PEG-dilauryloxypropyl (Ci₂), a PEG-dimyristyloxypropyl (Ci₄), a PEG-dipalmityloxypropyl (Ci₆), or a PEG-distearyloxypropyl (C]₈). The conjugated lipid that prevents aggregation of particles can be, for example, from 0 mol % to about 20 mol % or about 2 mol % of the total lipid present in the particle.

[0242] In some embodiments, the nucleic acid-lipid particle further includes cholesterol at, e.g., about 10 mol % to about 60 mol % or about 50 mol % of the total lipid present in the particle.

[0243] B. Combination Therapies

[0244] A method of the invention can be used alone or in combination with an additional therapeutic agent, e.g., other agents that treat the same disorder, e.g., Parkinson's Disease, or symptoms associated therewith, or in combination with other types of therapies to the disorder. In combination treatments, the dosages of one or more of the therapeutic compounds may be reduced from standard dosages when administered alone. For example, doses may be determined empirically from drug combinations and permutations or may be deduced by isobolographic analysis. Dosages of the compounds when combined should provide a therapeutic effect.

[0245] In some embodiments, the second therapeutic agent is a dopamine precursor. In other embodiments, the second therapeutic agent is a dopamine receptor agonist. In some embodiments, the second therapeutic agent is an anticholinergic drug. In some embodiments, the second therapeutic agent is an interferon, e.g., interferon-gamma, or TNF-alpha.

[0246] The second agent may also be a therapeutic agent which is a non-drug treatment. For example, the second therapeutic agent is physical therapy, or a psychiatric treatment.

[0247] Exemplary drugs used to treat Parkinson's Disease include L-dopa, selegiline, apomorphine and anticholinergics. L-dopa (levo-dihydroxy-phenylalanine) (sinemet) is a dopamine precursor which can cross the blood-brain barrier and be converted to dopamine in the brain. It is usually combined with carbidopa, which prevents or reduces potential side effects. Selegiline (Deprenyl, Eldepryl) has been used as an alternative to L-dopa, and acts by reducing the breakdown of dopamine in the brain. Apomorphine, a dopamine receptor agonist, has also been used to treat Parkinson's Disease and it directly stimulates receptors in nerves that would normally be stimulated by dopamine. Systemically administered anticholinergic drugs (such as benzhexol and orphenedrine) have also been used to treat Parkinson's Disease and act by reducing the amount of acetylcholine produced in the brain and thereby redress the dopamine/acetylcholine imbalance present in Parkinson's Disease. Stereotactic surgery offered one of the few effective treatments for Parkinson's Disease.

[0248] In any of the combination embodiments described herein, the first and second therapeutic agents are administered simultaneously or sequentially, in either order. The first therapeutic agent may be administered immediately, up to 1 hour, up to 2 hours, up to 3 hours, up to 4 hours, up to 5 hours, up to 6 hours, up to 7 hours, up to, 8 hours, up to 9 hours, up to 10 hours, up to 11 hours, up to 12 hours, up to 13 hours, 14 hours, up to hours 16, up to 17 hours, up 18 hours, up to 19 hours up to 20 hours, up to 21 hours, up to 22 hours, up to 23 hours up to 24 hours or up to 1-7, 1-14, 1-21 or 1-30 days before or after the second therapeutic agent.

### III. Compositions for Use in the Methods of the Invention

[0249] The compositions for use in the methods of the present invention, i.e., methods of editing an LRRK2 polynucleotide, e.g., an LRRK2 polynucleotide comprising a single nucleotide polymorphism (SNP) associated with Parkinson's Disease (PD), and methods for treating or preventing an LRRK2-associated disease, e.g., Parkinson's Disease, in a subject, include a guide oligonucleotide capable of effecting an adenosine deaminase acting on RNA (ADAR)-mediated adenosine to inosine alteration of the SNP associated with Parkinson's Disease.

[0250] The oligonucleotides, or guide oligonucleotides, for use in the methods of the invention may be utilized to deaminate target adenosines on a specific mRNA, e.g., an adenosine which may be deaminated to produce a therapeutic result, e.g., in a subject in need thereof.

[0251] Examples of modifications resulting from deamination of target adenosines within a target codon are provided in Tables 1 and 2 below.

TABLE 1

| | Amino Acid | | Amino Acid |
|---|---|---|---|
| Target | Encoded by | Modified | Encoded by |
| Codon | Target Codon | Codon | Modified Codon |
| AAA | Lys | IAA | Glu |
| | | AIA | Arg |
| | | IIA | Gly |
| | | AII | Arg |
| | | IAI | Glu |
| | | III | Gly |
| AAC | Asn | IAC | Asp |
| | | AIC | Ser |
| | | IIC | Gly |
| AAG | Lys | IAG | Glu |
| | | AIG | Arg |
| | | IIG | Gly |
| AAU | Arg | IAU | Asp |
| | | AIU | Ser |
| | | IIU | Gly |
| ACA | Thr | ICA | Ala |
| | | ICI | Ala |
| ACC | Thr | ICC | Ala |
| ACG | Thr | ICG | Ala |
| ACU | Thr | ICU | Ala |
| AGA | Arg | IGA | Gly |
| | | IGI | Gly |
| AGC | Ser | IGC | Gly |
| AGG | Arg | IGG | Gly |
| AGU | Ser | IGU | Gly |
| AUA | Ile | IUA | Asp |
| | | AUI | Met |
| | | IUI | Val |
| AUC | Ile | IUC | Val |
| AUG | Met | IUG | Val |
| AUU | Ile | IUU | Val |
| CAA | Gln | CIA | Arg |
| | | CII | Arg |
| CAC | His | CIC | Arg |
| CAG | Gln | CIG | Arg |
| CAU | His | CIU | Arg |
| GAA | Glu | GIA | Gly |
| | | GII | Gly |
| GAC | Asp | GIC | Gly |
| GAG | Glu | GIG | Gly |
| GAU | Asp | GIU | Gly |
| UAA | Stop | UII | Trp |
| UGA | Stop | UGI | Trp |
| UAC | Tyr | UIC | Cys |
| UAG | Stop | UIG | Trp |
| UAU | Tyr | UIU | Cys |

TABLE 2
Target Codon Base Composition and Resulting Modified Codon

| Target Codon | Modified Codon |
|---|---|
| AAA | AIA |
| AAC | AIC |
| AAG | AIG |
| AAU | AIU |
| CAA | CIA |
| CAC | CIC |
| CAG | CIG |
| CAU | CIU |
| GAA | GIA |
| GAC | GIC |
| GAG | GIG |
| GAU | GIU |
| UAA | UIA |
| UAC | UIC |
| UAG | UIG |
| UAU | UIU |

[0252] Because the deamination of the adenosine to an inosine may result in a protein that no longer bears the mutated A at the target position, the identification of the deamination into inosine may be a functional read-out, for instance an assessment on whether a functional protein is present, or even the assessment that a disease that is caused by the presence of the adenosine is (partly) reversed. The functional assessment for each of the diseases mentioned herein will generally be according to methods known to the skilled person. When the presence of a target adenosine causes aberrant splicing, the read-out may be the assessment of whether the aberrant splicing is still taking place, or not, or less. On the other hand, when the deamination of a target adenosine is wanted to introduce a splice site, then similar approaches can be used to check whether the required type of splicing is indeed taking place. A very suitable manner to identify the presence of an inosine after deamination of the target adenosine is of course RT-PCR and sequencing, using methods that are well-known to the person skilled in the art.

[0253] In general, mutations in any target RNA that can be reversed using oligonucleotide constructs according to the invention are G-to-A mutations, and oligonucleotide constructs can be designed accordingly. Mutations that may be targeted using oligonucleotide constructs according to the invention also include C to A, U to A (T to A on the DNA level) in the case of recruiting adenosine deaminases. Although RNA editing in the latter circumstances may not necessarily revert the mutation to wild-type, the edited nucleotide may give rise to an improvement over the original mutation. For example, a mutation that causes an in frame stop codon—giving rise to a truncated protein, upon translation—may be changed into a codon coding for an amino acid that may not be the original amino acid in that position, but that gives rise to a (full length) protein with at least some functionality, at least more functionality than the truncated protein.

### Oligonucleotide Agents

[0254] The oligonucleotides for use in the methods of the present invention are complementary to target mRNA sequence, e.g., LRRK2, comprising the SNP associated with a disease, e.g., Parkinson's Disease (PD). In some embodiments, the guide oligonucleotides are complementary to target mRNA with the exception of at least one mismatch. The oligonucleotide includes a mismatch opposite the target adenosine.

[0255] The guide oligonucleotides are also capable of recruiting adenosine deaminase acting on RNA (ADAR) enzymes to deaminate selected adenosines on the target mRNA. In some embodiments, the oligonucleotide further comprises one or more ADAR-recruiting domains. In some embodiments, only one adenosine is deaminated. In some embodiments, 1, 2, or 3 adenosines are deaminated.

[0256] The oligonucleotides for use in the methods of the invention may further include modifications (e.g., alternative nucleotides) to increase stability and/or increase deamination efficiency.

[0257] Whenever reference is made to nucleotides in the guide oligonucleotide, such as cytosine, 5-methylcytosine, 5-hydroxymethylcytosine, Pyrrolocytidine, and -D-Glucosyl-5-hydroxy-methylcytosine are included; when reference is made to adenine, 2-aminopurine, 2,6-diaminopurine, 3-deazaadenosine, 7-deazaadenosine, 8-azidoadenosine, 8-methyladenosine, 7-aminomethyl-7-deazaguanosine, 7-deazaguanosine, N6-Methyladenine and 7-methyladenine are included; when reference is made to uracil, 5-methoxyuracil, 5-methyluracil, dihydrouracil, pseudouracil, and thienouracil, dihydrouracil, 4-thiouracil and 5-hydroxymethyluracil are included; when reference is made to guanosine, 7-methylguanosine, 8-aza-7-deazaguanosine, thienoguanosine and 1-methylguanosine are included.

[0258] Whenever reference is made to nucleosides or nucleotides, ribofuranose derivatives, such as 2′-deoxy, 2′-hydroxy, 2-fluororibose and 2′-O-substituted variants, such as 2′-O-methyl, are included, as well as other modifications, including 2′-4′ bridged variants.

[0259] Whenever reference is made to oligonucleotides, linkages between two mono-nucleotides may be phosphodiester linkages as well as modifications thereof, including, phosphodiester, phosphotriester, phosphoro(di)thioate, methylphosphonate, phosphor-amidate linkers, and the like.

### Modifications

[0260] A guide oligonucleotide according to the present invention may be chemically modified in its entirety, for example by providing all nucleotides with a 2′-O-methylated sugar moiety (2′-OMe). Various chemistries and modification are known in the field of oligonucleotides that can be readily used in accordance with the invention. The regular internucleosidic linkages between the nucleotides may be altered by mono- or di-thioation of the phosphodiester bonds to yield phosphorothioate esters or phosphorodithioate esters, respectively. Other modifications of the internucleosidic linkages are possible, including amidation and peptide linkers. In some embodiments, the guide oligonucleotides of the present invention have one, two, three, four or more phosphorothioate linkages. It will be understood by the skilled person that the number of such linkages may vary on each end, depending on the target sequence, or based on other aspects, such as toxicity.

[0261] The ribose sugar may be modified by substitution of the 2′-O moiety with a lower alkyl (C₁₋₄, such as 2′-0-methyl), alkenyl (C₂₋₄), alkynyl (C₂₋₄), methoxyethyl (2′-O-MOE), —H (as in DNA) or other substituent. Preferred substituents of the 2′-OH group are a methyl, methoxyethyl or 3,3′-dimethylallyl group. The latter is known for its property to inhibit nuclease sensitivity due to its bulkiness, while improving efficiency of hybridization (Angus & Sproat. 1993. FEBS Vol. 325, no. 1, 2, 123-7). Alternatively, locked nucleic acid sequences (LNAs), comprising a 2′-4′ intramolecular bridge (usually a methylene bridge between the 2′ oxygen and 4′ carbon) linkage inside the ribose ring, or 2′-fluoroarabinonucleosides (FANA), may be applied. Purine nucleobases and/or pyrimidine nucleobases may be modified to alter their properties, for example by amination or deamination of the heterocyclic rings. The exact chemistries and formats may vary from oligonucleotide construct to oligonucleotide construct and from application to application. It is believed that 4 or more consecutive DNA nucleotides (4 consecutive deoxyriboses) in an oligonucleotide create so-called gapmers that—when annealed to their RNA cognate sequences—induce cleavage of the target RNA by RNaseH. According to the present invention, RNaseH cleavage of the target RNA is generally to be avoided as much as possible.

[0262] Examples of chemical modifications in the guide oligonucleotides of the present invention are modifications of the sugar moiety, including by cross-linking substituents within the sugar (ribose) moiety (e.g., as in locked nucleic acids: LNA), by substitution of the 2′-O atom with alkyl (e.g. 2′-O-methyl), alkynyl (2′-O-alkynyl), alkenyl (2′-O-alkenyl), alkoxyalkyl (e.g. methoxyethyl: 2′-O-MOE) groups, having a length as specified above, and the like. In addition, the phosphodiester group of the backbone may be modified by thioation, dithioation, amidation and the like to yield phosphorothioate, phosphorodithioate, phosphoramidate, etc., internucleosidic linkages. The internucleotidic linkages may be replaced in full or in part by peptidic linkages to yield in peptidonucleic acid sequences and the like. Alternatively, or in addition, the nucleobases may be modified by (de)amination, to yield inosine or 2′6′-diaminopurines and the like. A further modification may be methylation of the C5 in the cytidine moiety of the nucleotide, to reduce potential immunogenic properties known to be associated with CpG sequences

[0263] The inventors of the present invention surprisingly discovered that relative to the editing observed for a guide oligonucleotide that is fully 2′-OMe modified with a DNA triplet, generally editing is higher for guide oligonucleotides comprising a FANA triplet, and for guide oligonucleotides comprising an unmodified or fully 2′-OMe modified dsRBD motif (i.e., the portion of the guide oligonucleotide that binds to the double-stranded RNA binding domain (dsRBD) of ADAR).

### Mismatches

[0264] The inventors of the present invention have discovered that mismatches, wobbles and/or out-looping bulges (caused by nucleotides in the guide oligonucleotide that do not form perfect base pairs with the target RNA according to the Watson-Crick base pairing rules) are generally tolerated and may improve editing activity of the target RNA sequence. The number of mismatches, wobbles or bulges in the guide oligonucleotide of the present invention (when it hybridizes to its RNA target sequence) may be one (which may be the one mismatch formed at the target adenosine position, when a cytosine is the opposite nucleoside, or some other position in the guide oligonucleotide) or more (either including or not including the mismatch at the target adenosine), depending on the length of the guide oligonucleotide. Additional mismatches, wobbles or bulges may be upstream as well as downstream of the target adenosine. In some embodiments, a mismatch or wobble is present at the position 12 nucleotides upstream (towards the 5′ end) from the targeted adenosine. In some embodiments, a mismatch or wobble is present at the position 16 nucleotides upstream (towards the 5′ end) from the targeted adenosine. In some embodiments, a mismatch or wobble is present at the position 17 nucleotides upstream (towards the 5′ end) from the targeted adenosine. In some embodiments, a mismatch or wobble is present at the position 21 nucleotides upstream (towards the 5′ end) from the targeted adenosine. The bulges or mismatches may be at a single position (caused by one mismatching, wobble or bulge base pair) or a series of nucleotides that are not fully complementary (caused by more than one consecutive mismatching or wobble base pair or bulge, preferably two or three consecutive mismatching and/or wobble base pairs and/or bulges).

[0265] A. Alternative Oligonucleotides

[0266] In one embodiment, one or more of the nucleotides of the oligonucleotide of the invention, is naturally-occurring, and does not include, e.g., chemical modifications and/or conjugations known in the art and described herein. In another embodiment, one or more of the nucleotides of an oligonucleotide of the invention, is chemically modified to enhance stability or other beneficial characteristics (e.g., alternative nucleotides). Without being bound by theory, it is believed that certain modification can increase nuclease resistance and/or serum stability, or decrease immunogenicity. For example, polynucleotides of the invention may contain nucleotides found to occur naturally in DNA or RNA (e.g., adenine, thymidine, guanosine, cytidine, uridine, or inosine) or may contain nucleotides which have one or more chemical modifications to one or more components of the nucleotide (e.g., the nucleobase, sugar, or phospho-linker moiety). Oligonucleotides of the invention may be linked to one another through naturally-occurring phosphodiester bonds, or may be modified to be covalently linked through phosphorothiorate, 3′-methylenephosphonate, 5′-methylenephosphonate, 3′-phosphoamidate, 2′-5′ phosphodiester, guanidinium, S-methylthiourea, or peptide bonds.

[0267] In some embodiments, one or more of the nucleotides of the oligonucleotide of the invention has the structure of any one of Formula I-V:

[chemical structure]

[0268] In some embodiments, one or more of the nucleotides of the oligonucleotide of the invention has the structure of any one of Formula I, e.g., has the structure:

[chemical structure]

[0269] In some embodiments, one or more of the nucleotides of the oligonucleotide of the invention has the structure of any one of Formula II, e.g., has the structure:

[chemical structure]

[0270] In some embodiments, one or more of the nucleotides of the oligonucleotide of the invention has the structure of any one of Formula III.

[0271] In some embodiments, one or more of the nucleotides of the oligonucleotide of the invention has the structure of any one of Formula IV, e.g., has the structure:

[chemical structure]

[0272] In some embodiments, one or more of the nucleotides of the oligonucleotide of the invention has the structure of any one of Formula V, e.g., has the structure:

[chemical structure]

[0273] In certain embodiments of the invention, substantially all of the nucleotides of an oligonucleotide of the invention are alternative nucleotides. In other embodiments of the invention, all of the nucleotides of an oligonucleotide of the invention are alternative nucleotides. Oligonucleotides of the invention in which “substantially all of the nucleotides are alternative nucleotides” are largely but not wholly modified and can include no more than 5, 4, 3, 2, or 1 naturally-occurring nucleotides. In still other embodiments of the invention, oligonucleotides of the invention can include no more than 5, 4, 3, 2, or 1 alternative nucleotides.

[0274] In some embodiments, the oligonucleotides of the instant invention include the structure:

[Aₘ]-X¹—X²—X³—[Bₙ]

wherein each of A and B is a nucleotide; m and n are each, independently, an integer from 5 to 40; at least one of X¹, X², and X³ has the structure of Formula I, wherein R¹ is fluoro, hydroxy, or methoxy and N¹ is a nucleobase, or the structure of Formula V, wherein R⁴ is hydrogen and R⁵ is hydrogen; each of X¹, X², and X³ that does not have the structure of Formula I is a ribonucleotide; [Aₘ] and [Bₙ] each include at least five terminal 2′-O-methyl-nucleotides; at least four terminal phosphorothioate linkages, and at least 20% of the nucleotides of [Aₘ] and [Bₙ] combined are 2′-O-methyl-nucleotides. In some embodiments, X¹ includes an adenine nucleobase, X² includes a cytosine, 5-methylcytosine, uracil, or thymine nucleobase or does not include a nucleobase, and X³ includes an adenine nucleobase; X¹ includes an adenine nucleobase, X² includes a cytosine, 5-methylcytosine, uracil, or thymine nucleobase or does not include a nucleobase, and X³ includes a guanine or hypoxanthine nucleobase; X¹ includes an adenine nucleobase, X² includes a cytosine, 5-methylcytosine, uracil, or thymine nucleobase or does not include a nucleobase, and X³ includes a uracil or thymine nucleobase; X¹ includes an adenine nucleobase, X² includes a cytosine, 5-methylcytosine, uracil, or thymine nucleobase or does not include a nucleobase, and X³ includes a cytosine or 5-methylcytosine nucleobase; X¹ includes a guanine or hypoxanthine nucleobase, X² includes a cytosine, 5-methylcytosine, uracil, or thymine nucleobase or does not include a nucleobase, and X³ includes an adenine nucleobase; X¹ includes a guanine or hypoxanthine nucleobase, X² includes a cytosine, 5-methylcytosine, uracil, or thymine nucleobase or does not include a nucleobase, and X³ includes a guanine or hypoxanthine nucleobase; X¹ includes a guanine or hypoxanthine nucleobase, X² includes a cytosine, 5-methylcytosine, uracil, or thymine nucleobase or does not include a nucleobase, and X³ includes a uracil or thymine nucleobase; X¹ includes a guanine or hypoxanthine nucleobase, X² includes a cytosine, 5-methylcytosine, uracil, or thymine nucleobase or does not include a nucleobase, and X³ includes a cytosine or 5-methylcytosine nucleobase; X¹ includes a uracil or thymine nucleobase, X² includes a cytosine, 5-methylcytosine, uracil, or thymine nucleobase or does not include a nucleobase, and X³ includes an adenine nucleobase; X¹ includes a uracil or thymine nucleobase, X² includes a cytosine, 5-methylcytosine, uracil, or thymine nucleobase or does not include a nucleobase, and X³ includes a guanine or hypoxanthine nucleobase; X¹ includes a uracil or thymine nucleobase, X² includes a cytosine, 5-methylcytosine, uracil, or thymine nucleobase or does not include a nucleobase, and X³ includes a uracil or thymine nucleobase; X¹ includes a uracil or thymine nucleobase, X² includes a cytosine, 5-methylcytosine, uracil, or thymine nucleobase or does not include a nucleobase, and X³ includes a cytosine or 5-methylcytosine nucleobase; X¹ includes a cytosine or 5-methylcytosine nucleobase, X² includes a cytosine, 5-methylcytosine, uracil, or thymine nucleobase or does not include a nucleobase, and X³ includes an adenine nucleobase; X¹ includes a cytosine or 5-methylcytosine nucleobase, X² includes a cytosine, 5-methylcytosine, uracil, or thymine nucleobase or does not include a nucleobase, and X³ includes a guanine or hypoxanthine nucleobase; X¹ includes a cytosine or 5-methylcytosine nucleobase, X² includes a cytosine, 5-methylcytosine, uracil, or thymine nucleobase or does not include a nucleobase, and X³ includes a uracil or thymine nucleobase; or X¹ includes a cytosine or 5-methylcytosine nucleobase, X² includes a cytosine, 5-methylcytosine, uracil, or thymine nucleobase or does not include a nucleobase, and X³ includes a cytosine or 5-methylcytosine nucleobase.

[0275] In some embodiments, one or more of the nucleotides of the oligonucleotide of the invention has the structure of any one of Formula VI-XI:

[chemical structure]

[0276] In some embodiments, one or more of the nucleotides of the oligonucleotide of the invention has the structure of any one of Formula VI.

[0277] In some embodiments, one or more of the nucleotides of the oligonucleotide of the invention has the structure of any one of Formula VII.

[0278] In some embodiments, one or more of the nucleotides of the oligonucleotide of the invention has the structure of any one of Formula VIII.

[0279] In some embodiments, one or more of the nucleotides of the oligonucleotide of the invention has the structure of any one of Formula IX, e.g., has the structure:

[chemical structure]

In some embodiments, one or more of the nucleotides of the oligonucleotide of the invention has the structure of any one of Formula X, e.g., has the structure:

[chemical structure]

In some embodiments, one or more of the nucleotides of the oligonucleotide of the invention has the structure of any one of Formula XI, e.g., has the structure:

[chemical structure]

[0280] In certain embodiments of the invention, substantially all of the nucleotides of an oligonucleotide of the invention are alternative nucleotides. In other embodiments of the invention, all of the nucleotides of an oligonucleotide of the invention are alternative nucleotides. Oligonucleotides of the invention in which “substantially all of the nucleotides are alternative nucleotides” are largely but not wholly modified and can include no more than 5, 4, 3, 2, or 1 naturally-occurring nucleotides. In still other embodiments of the invention, oligonucleotides of the invention can include no more than 5, 4, 3, 2, or 1 alternative nucleotides.

[0281] In some embodiments of the invention, the oligonucleotides of the instant invention include the structure:

[Aₘ]-X¹—X²—X³—[Bₙ]

wherein each of A and B is a nucleotide; m and n are each, independently, an integer from 5 to 40; at least one of X¹, X², and X³ has the structure of Formula VI, Formula VII, Formula VIII, or Formula IX, wherein N¹ is a nucleobase and each of X¹, X², and X³ that does not have the structure of Formula VI, Formula VII, Formula VIII, or Formula IX is a ribonucleotide; [Aₘ] and [Bₙ] each include at least five terminal 2′-O-methyl-nucleotides and at least four terminal phosphorothioate linkages; and at least 20% of the nucleotides of [Aₘ] and [Bₙ] combined are 2′-O-methyl-nucleotides. In some embodiments, X¹ includes an adenine nucleobase, X² includes a cytosine, 5-methylcytosine, uracil, or thymine nucleobase or does not include a nucleobase, and X³ includes an adenine nucleobase; X¹ includes an adenine nucleobase, X² includes a cytosine, 5-methylcytosine, uracil, or thymine nucleobase or does not include a nucleobase, and X³ includes a guanine or hypoxanthine nucleobase; X¹ includes an adenine nucleobase, X² includes a cytosine, 5-methylcytosine, uracil, or thymine nucleobase or does not include a nucleobase, and X³ includes a uracil or thymine nucleobase; X¹ includes an adenine nucleobase, X² includes a cytosine, 5-methylcytosine, uracil, or thymine nucleobase or does not include a nucleobase, and X³ includes a cytosine or 5-methylcytosine nucleobase; X¹ includes a guanine or hypoxanthine nucleobase, X² includes a cytosine, 5-methylcytosine, uracil, or thymine nucleobase or does not include a nucleobase, and X³ includes an adenine nucleobase; X¹ includes a guanine or hypoxanthine nucleobase, X² includes a cytosine, 5-methylcytosine, uracil, or thymine nucleobase or does not include a nucleobase, and X³ includes a guanine or hypoxanthine nucleobase; X¹ includes a guanine or hypoxanthine nucleobase, X² includes a cytosine, 5-methylcytosine, uracil, or thymine nucleobase or does not include a nucleobase, and X³ includes a uracil or thymine nucleobase; X¹ includes a guanine or hypoxanthine nucleobase, X² includes a cytosine, 5-methylcytosine, uracil, or thymine nucleobase or does not include a nucleobase, and X³ includes a cytosine or 5-methylcytosine nucleobase; X¹ includes a uracil or thymine nucleobase, X² includes a cytosine, 5-methylcytosine, uracil, or thymine nucleobase or does not include a nucleobase, and X³ includes an adenine nucleobase; X¹ includes a uracil or thymine nucleobase, X² includes a cytosine, 5-methylcytosine, uracil, or thymine nucleobase or does not include a nucleobase, and X³ includes a guanine or hypoxanthine nucleobase; X¹ includes a uracil or thymine nucleobase, X² includes a cytosine, 5-methylcytosine, uracil, or thymine nucleobase or does not include a nucleobase, and X³ includes a uracil or thymine nucleobase; X¹ includes a uracil or thymine nucleobase, X² includes a cytosine, 5-methylcytosine, uracil, or thymine nucleobase or does not include a nucleobase, and X³ includes a cytosine or 5-methylcytosine nucleobase; X¹ includes a cytosine or 5-methylcytosine nucleobase, X² includes a cytosine, 5-methylcytosine, uracil, or thymine nucleobase or does not include a nucleobase, and X³ includes an adenine nucleobase; X¹ includes a cytosine or 5-methylcytosine nucleobase, X² includes a cytosine, 5-methylcytosine, uracil, or thymine nucleobase or does not include a nucleobase, and X³ includes a guanine or hypoxanthine nucleobase; X¹ includes a cytosine or 5-methylcytosine nucleobase, X² includes a cytosine, 5-methylcytosine, uracil, or thymine nucleobase or does not include a nucleobase, and X³ includes a uracil or thymine nucleobase; or X¹ includes a cytosine or 5-methylcytosine nucleobase, X² includes a cytosine, 5-methylcytosine, uracil, or thymine nucleobase or does not include a nucleobase, and X³ includes a cytosine or 5-methylcytosine nucleobase.

[0282] In some embodiments, one or more of the nucleotides of the oligonucleotide of the invention has the structure of any one of Formula XII-XV:

[chemical structure]

[0283] In some embodiments, one or more of the nucleotides of the oligonucleotide of the invention has the structure of any one of Formula XII, e.g., has the structure:

[chemical structure]

[0284] In some embodiments, one or more of the nucleotides of the oligonucleotide of the invention has the structure of any one of Formula XIII, e.g., has the structure:

[chemical structure]

[0285] In some embodiments, one or more of the nucleotides of the oligonucleotide of the invention has the structure of any one of Formula XIV, e.g., has the structure:

[chemical structure]

[0286] In some embodiments, one or more of the nucleotides of the oligonucleotide of the invention has the structure of any one of Formula XV.

[0287] In certain embodiments of the invention, substantially all of the nucleotides of an oligonucleotide of the invention are alternative nucleotides. In other embodiments of the invention, all of the nucleotides of an oligonucleotide of the invention are alternative nucleotides. Oligonucleotides of the invention in which “substantially all of the nucleotides are alternative nucleotides” are largely but not wholly modified and can include no more than 5, 4, 3, 2, or 1 naturally-occurring nucleotides. In still other embodiments of the invention, oligonucleotides of the invention can include no more than 5, 4, 3, 2, or 1 alternative nucleotides.

[0288] In some embodiments, the oligonucleotides of the instant invention include the structure:

[Aₘ]-X¹—X²—X³—[Bₙ]

wherein each of A and B is a nucleotide; m and n are each, independently, an integer from 5 to 40; at least of X¹, X², and X³ has the structure of Formula XIII, wherein R⁸ and R⁹ are each hydrogen, and each of X¹, X² and X³ that does not have the structure of Formula XIII is a ribonucleotide; [Aₘ] and [Bₙ] each include at least five terminal 2′-O-methyl-nucleotides and at least four terminal phosphorothioate linkages; and at least 20% of the nucleotides of [Aₘ] and [Bₙ] combined are 2′-O-methyl-nucleotides. In some embodiments, X¹ includes an adenine nucleobase, X² includes a cytosine, 5-methylcytosine, uracil, or thymine nucleobase or does not include a nucleobase, and X³ includes an adenine nucleobase; X¹ includes an adenine nucleobase, X² includes a cytosine, 5-methylcytosine, uracil, or thymine nucleobase or does not include a nucleobase, and X³ includes a guanine or hypoxanthine nucleobase; X¹ includes an adenine nucleobase, X² includes a cytosine, 5-methylcytosine, uracil, or thymine nucleobase or does not include a nucleobase, and X³ includes a uracil or thymine nucleobase; X¹ includes an adenine nucleobase, X² includes a cytosine, 5-methylcytosine, uracil, or thymine nucleobase or does not include a nucleobase, and X³ includes a cytosine or 5-methylcytosine nucleobase; X¹ includes a guanine or hypoxanthine nucleobase, X² includes a cytosine, 5-methylcytosine, uracil, or thymine nucleobase or does not include a nucleobase, and X³ includes an adenine nucleobase; X¹ includes a guanine or hypoxanthine nucleobase, X² includes a cytosine, 5-methylcytosine, uracil, or thymine nucleobase or does not include a nucleobase, and X³ includes a guanine or hypoxanthine nucleobase; X¹ includes a guanine or hypoxanthine nucleobase, X² includes a cytosine, 5-methylcytosine, uracil, or thymine nucleobase or does not include a nucleobase, and X³ includes a uracil or thymine nucleobase; X¹ includes a guanine or hypoxanthine nucleobase, X² includes a cytosine, 5-methylcytosine, uracil, or thymine nucleobase or does not include a nucleobase, and X³ includes a cytosine or 5-methylcytosine nucleobase; X¹ includes a uracil or thymine nucleobase, X² includes a cytosine, 5-methylcytosine, uracil, or thymine nucleobase or does not include a nucleobase, and X³ includes an adenine nucleobase; X¹ includes a uracil or thymine nucleobase, X² includes a cytosine, 5-methylcytosine, uracil, or thymine nucleobase or does not include a nucleobase, and X³ includes a guanine or hypoxanthine nucleobase; X¹ includes a uracil or thymine nucleobase, X² includes a cytosine, 5-methylcytosine, uracil, or thymine nucleobase or does not include a nucleobase, and X³ includes a uracil or thymine nucleobase; X¹ includes a uracil or thymine nucleobase, X² includes a cytosine, 5-methylcytosine, uracil, or thymine nucleobase or does not include a nucleobase, and X³ includes a cytosine or 5-methylcytosine nucleobase; X¹ includes a cytosine or 5-methylcytosine nucleobase, X² includes a cytosine, 5-methylcytosine, uracil, or thymine nucleobase or does not include a nucleobase, and X³ includes an adenine nucleobase; X¹ includes a cytosine or 5-methylcytosine nucleobase, X² includes a cytosine, 5-methylcytosine, uracil, or thymine nucleobase or does not include a nucleobase, and X³ includes a guanine or hypoxanthine nucleobase; X¹ includes a cytosine or 5-methylcytosine nucleobase, X² includes a cytosine, 5-methylcytosine, uracil, or thymine nucleobase or does not include a nucleobase, and X³ includes a uracil or thymine nucleobase; or X¹ includes a cytosine or 5-methylcytosine nucleobase, X² includes a cytosine, 5-methylcytosine, uracil, or thymine nucleobase or does not include a nucleobase, and X³ includes a cytosine or 5-methylcytosine nucleobase.

[0289] In some embodiments, the oligonucleotides for use in the methods of the instant invention include a recruitment domain for the ADAR enzyme (e.g., an ADAR-recruiting domain). In some embodiments, the ADAR-recruiting domain is a stem-loop structure. Such oligonucleotides may be referred to as “axiomer AONs” or “self-looping AONs.” The recruitment portion acts in recruiting a natural ADAR enzyme present in the cell to the dsRNA formed by hybridization of the target sequence with the targeting portion. The recruitment portion may be a stem-loop structure mimicking either a natural substrate (e.g. the glutamate ionotropic receptor AMPA type subunit 2 (GluR2) receptor; such as a GluR2 ADAR-recruiting domain) or a Z-DNA structure known to be recognized by the dsRNA binding regions of ADAR enzymes (e.g., a Z-DNA ADAR-recruiting domain). As GluR2 and Z-DNA ADAR-recruiting domains are high affinity binding partners to ADAR, there is no need for conjugated entities or presence of modified recombinant ADAR enzymes. A stem-loop structure can be an intermolecular stem-loop structure, formed by two separate nucleic acid strands, or an intramolecular stem loop structure, formed within a single nucleic acid strand. The stem-loop structure of the recruitment portion may be a step loop structure described in WO 2016/097212, US 2018/0208924, Merkle et al. Nature Biotechnology, 37: 133-8 (2019), Katrekar et al. Nature Methods, 16(3): 239-42 (2019), Fukuda et al. Scientific Reports, 7: 41478 (2017), the stem-loop structures of the ADAR recruitment portion of which are herein incorporated by reference. In some embodiments, the oligonucleotides include one or more ADAR-recruiting domains (e.g., 1 or 2 ADAR-recruiting domains). In some embodiments, the ADAR-recruiting domain is at the 5′ end of the oligonucleotide. In other embodiments, the ADAR-recruiting domain is at the 3′ end of said oligonucleotide. In some embodiments, the oligonucleotide includes a first ADAR-recruiting domain and a second ADAR-recruiting domain. the first ADAR-recruiting domain is at the 5′ end of said oligonucleotide, and the second ADAR-recruiting domain is at the 3′ end of said oligonucleotide.

[0290] In some embodiments, the oligonucleotide includes the structure of Formula XVI:

C-L₁-D-L₂-[Aₘ]-X¹—X²—X³—[Bₙ] Formula XVI,

wherein [Aₘ]-X¹—X²—X³—[Bₙ] is the oligonucleotide of any one of formulas I-XV; C is a single-stranded oligonucleotide of 10-50 linked nucleosides in length; L₁ is a loop region; and D is a single-stranded oligonucleotide of 10-50 linked nucleosides in length; L₂ is an optional linker; wherein the oligonucleotide includes a duplex structure formed by C and D of between 10-50 linked nucleosides in length, wherein the duplex structure includes at least one mismatch between nucleotides of C and nucleotides of D, and wherein C or D includes at least one alternative nucleobase.

[0291] In some embodiments, C and D include at least one alternative nucleobase. In other embodiments, L₁ includes linked nucleosides. In yet another embodiment, L₁ consists of linked nucleosides. In some embodiments, L₁ includes at least one alternative nucleobase, at least one alternative internucleoside linkage, and/or at least one alternative sugar moiety. In some embodiments, C or D includes at least one alternative internucleoside linkage and/or at least one alternative sugar moiety. In some embodiments, C and D each independently includes at least one alternative internucleoside linkage and/or at least one alternative sugar moiety.

[0292] In some embodiments, the oligonucleotide includes the structure of Formula XVII:

C-L₁-D-L₂-[Aₘ]-X¹—X²—X³—[Bₙ] Formula XVII,

wherein [Aₘ]-X¹—X²—X³—[Bₙ] is the oligonucleotide of any one of Formulas I-XV; C is a single-stranded oligonucleotide of 10-50 linked nucleosides in length; L₁ is a loop region that does not consist of linked nucleosides; and D is a single-stranded oligonucleotide of 10-50 linked nucleosides in length; L₂ is an optional linker, wherein the oligonucleotide includes a duplex structure formed by C and D of between 10-50 linked nucleosides in length, and wherein the duplex structure includes at least one mismatch between nucleotides of C and nucleotides of D.

[0293] In some embodiments, L₁ has the structure of Formula XVIII:

F¹-(G¹)ⱼ-(H¹)ₖ-(G²)ₘ-(I)-(G₃)ₙ-(H²)ₚ-(G⁴)_{q}-F² Formula XVIII,

wherein F¹ is a bond between the loop region and C; F² is a bond between D and [Aₘ] or between D and, optionally, the linker; G¹, G², G³, and G⁴ each, independently, is selected from optionally substituted C₁-C₂ alkyl, optionally substituted C₁-C₃ heteroalkyl, O, S, and NR^{N}; R^{N} is hydrogen, optionally substituted C₁₋₄ alkyl, optionally substituted C₂₋₄ alkenyl, optionally substituted C₂₋₄ alkynyl, optionally substituted C₂₋₆ heterocyclyl, optionally substituted C₆₋₁₂ aryl, or optionally substituted C₁₋₇ heteroalkyl; C¹ and C² are each, independently, selected from carbonyl, thiocarbonyl, sulphonyl, or phosphoryl; j, k, m, n, p, and q are each, independently, 0 or 1; and I is optionally substituted C₁₋₁₀ alkyl, optionally substituted C₂₋₁₀ alkenyl, optionally substituted C₂₋₁₀ alkynyl, optionally substituted C₂₋₆ heterocyclyl, optionally substituted C₆₋₁₂ aryl, optionally substituted C₂-C₁₀ polyethylene glycol, or optionally substituted C₁₋₁₀ heteroalkyl, or a chemical bond linking F¹-(G¹)ⱼ-(H¹)ₖ-(G²)ₘ-(I)-(G³)ₙ-(H²)ₚ-(G⁴)_{q}-F².

[0294] In some embodiments, L₁ includes a carbohydrate-containing linking moiety.

[0295] In some embodiments, C or D each includes at least one alternative nucleobase, at least one alternative internucleoside linkage, and/or at least one alternative sugar moiety. In some embodiments, C and D each includes at least one alternative nucleobase, at least one alternative internucleoside linkage, and/or at least one alternative sugar moiety.

[0296] In some embodiments, the oligonucleotide includes the structure of Formula XIX:

C-L₁-D-L₂-[Aₘ]-X¹—X²—X³—[Bₙ] Formula XIX,

wherein [Aₘ]-X¹—X²—X³—[Bₙ] is the oligonucleotide of any one of formulas I to XV; C is a single-stranded oligonucleotide of 10-50 linked nucleosides in length; L₁ is a loop region including at least one alternative nucleobase or at least one alternative internucleoside linkage; and D is a single-stranded oligonucleotide of 10-50 linked nucleosides in length; L₂ is an optional linker, wherein the oligonucleotide includes a duplex structure formed by C and D of between 10-50 linked nucleosides in length, and wherein the duplex structure includes at least one mismatch between nucleotides of C and nucleotides of D.

[0297] In some embodiments, L₁ includes at least one alternative nucleobase and at least one alternative internucleoside linkage.

[0298] In some embodiments, the oligonucleotide includes the structure of Formula XX:

C-L₁-D-L₂-[Aₘ]-X¹—X²—X³—[Bₙ] Formula XX,

wherein [Aₘ]-X¹—X²—X³—[Bₙ] is the oligonucleotide of any one of formulas I to XV; C is a single-stranded oligonucleotide of 10-50 linked nucleosides in length; L₁ is a loop region including at least one alternative sugar moiety, wherein the alternative sugar moiety is selected from the group consisting of a 2′-O—C₁-C₆ alkyl-sugar moiety, a 2′-amino-sugar moiety, a 2′-fluoro-sugar moiety, a 2′-O-MOE sugar moiety, an arabino nucleic acid (ANA) sugar moiety, a deoxyribose sugar moiety, and a bicyclic nucleic acid; D is a single-stranded oligonucleotide of 10-50 linked nucleosides in length; and L₂ is an optional linker, wherein the oligonucleotide includes a duplex structure formed by C and D of between 10-50 linked nucleosides in length, and wherein the duplex structure includes at least one mismatch between nucleotides of C and nucleotides of D.

[0299] In some embodiments, the bicyclic sugar moiety is selected from an oxy-LNA sugar moiety (also referred to as an “LNA sugar moiety”), a thio-LNA sugar moiety, an amino-LNA sugar moiety, a cEt sugar moiety, and an ethylene-bridged (ENA) sugar moiety. In some embodiments, the ANA sugar moiety is a 2′-fluoro-ANA sugar moiety.

[0300] In some embodiments, C or D includes at least one alternative nucleobase, at least one alternative internucleoside linkage, and/or at least one alternative sugar moiety. In some embodiments, C and D each includes at least one alternative nucleobase, at least one alternative internucleoside linkage, and/or at least one alternative sugar moiety. In some embodiments, C is complementary to at least 5 contiguous nucleobases of D. In some embodiments, at least 80% (e.g., at least 85%, at least 90%, at least 95%) of the nucleobases of C are complementary to the nucleobases of D.

[0301] In some embodiments, C includes a nucleobase sequence having at least 80% sequence identity to a nucleobase sequence set forth in any one of SEQ ID NO. 1, 4, 7, 10, 13, 16, 19, 22, 25, 28, 31, and 34.

[0302] In some embodiments, D includes a nucleobase sequence having at least 80% sequence identity to a nucleobase sequence set forth in any one of SEQ ID NOs. 2, 5, 8, 11, 14, 17, 20, 23, 26, 29, 32, and 35.

[0303] In some embodiments, C-L₁-D includes a nucleobase sequence having at least 80% sequence identity to a nucleobase sequence set forth in any one of SEQ ID NOs. 3, 6, 9, 12, 15, 18, 21, 24, 27, 30, 33, and 36.

[0304] In some embodiments, the at least one alternative nucleobase is selected from the group consisting of 5-methylcytosine, 5-hydroxycytosine, 5-methoxycytosine, N4-methylcytosine, N3-Methylcytosine, N4-ethylcytosine, pseudoisocytosine, 5-fluorocytosine, 5-bromocytosine, 5-iodocytosine, 5-aminocytosine, 5-ethynylcytosine, 5-propynylcytosine, pyrrolocytosine, 5-aminomethylcytosine, 5-hydroxymethylcytosine, naphthyridine, 5-methoxyuracil, pseudouracil, dihydrouracil, 2-thiouracil, 4-thiouracil, 2-thiothymine, 4-thiothymine, 5,6-dihydrothymine, 5-halouracil, 5-propynyluracil, 5-aminomethyluracil, 5-hydroxymethyluracil, hypoxanthine, 7-deazaguanine, 8-aza-7-deazaguanine, 7-aza-2,6-diaminopurine, thienoguanine, N1-methylguanine, N2-methylguanine, 6-thioguanine, 8-methoxyguanine, 8-allyloxyguanine, 7-aminomethyl-7-deazaguanine, 7-methylguanine, imidazopyridopyrimidine, 7-deazaadenine, 3-deazaadenine, 8-aza-7-deazaadenine, 8-aza-7-deazaadenine, N1-methyladenine, 2-methyladenine, N6-methyladenine, 7-methyladenine, 8-methyladenine, or 8-azidoadenine.

[0305] In some embodiments, the at least one alternative nucleobase is selected from the group consisting of 2-amino-purine, 2,6-diamino-purine, 3-deaza-adenine, 7-deaza-adenine, 7-methyl-adenine, 8-azido-adenine, 8-methyl-adenine, 5-hydroxymethyl-cytosine, 5-methyl-cytosine, pyrrolo-cytosine, 7-aminomethyl-7-deaza-guanine, 7-deaza-guanine, 7-methyl-guanine, 8-aza-7-deaza-guanine, thieno-guanine, hypoxanthine, 4-thio-uracil, 5-methoxy-uracil, dihydro-uracil, or pseudouracil.

[0306] In some embodiments, the at least one alternative internucleoside linkage is selected from the group consisting of a phosphorothioate internucleoside linkage, a 2′-alkoxy internucleoside linkage, and an alkyl phosphate internucleoside linkage. In some embodiments, the at least one alternative internucleoside linkage is at least one phosphorothioate internucleoside linkage.

[0307] In some embodiments, the at least one alternative sugar moiety is selected from the group consisting of a 2′-O-alkyl-sugar moiety, a 2′-O-methyl-sugar moiety, a 2′-amino-sugar moiety, a 2′-fluoro-sugar moiety, a 2′-O-MOE sugar moiety, an ANA sugar moiety deoxyribose sugar moiety, and a bicyclic nucleic acid. In some embodiments, the bicyclic sugar moiety is selected from an oxy-LNA sugar moiety, a thio-LNA sugar moiety, an amino-LNA sugar moiety, a cEt sugar moiety, and an ethylene-bridged (ENA) sugar moiety. In some embodiments, the ANA sugar moiety is a 2′-fluoro-ANA sugar moiety. In some embodiments, the at least one alternative sugar moiety is a 2′-O-methyl-sugar moiety, a 2′-fluoro-sugar moiety, or a 2′-O-MOE sugar moiety.

[0308] In some embodiments, the at least one mismatch is a paired A to C mismatch, a paired G to G mismatch, or a paired C to A mismatch. In some embodiments, the oligonucleotide includes at least two mismatches between nucleotides of C and nucleotides of D.

[0309] In some embodiments, the at least two mismatches are separated by at least three linked nucleosides. In some embodiments, the at least two mismatches are separated by three linked nucleosides.

[0310] In some embodiments, the at least one mismatch includes a nucleoside having an alternative nucleobase. In some embodiments, the alternative nucleobase has the structure:

[chemical structure]

wherein R¹ is hydrogen, trifluoromethyl, optionally substituted amino, hydroxyl, or optionally substituted C₁-C₆ alkoxy; R² is hydrogen, optionally substituted amino, or optionally substituted C₁-C₆ alkyl; and R³ and R⁴ are, independently, hydrogen, halogen, or optionally substituted C₁-C₆alkyl, or a salt thereof.

[0311] In one embodiment, the oligonucleotides of the invention include those including an ADAR-recruiting domain having a structure of Formula XXXIV:

C-L₁-D, Formula XXXIV,

wherein C is a single-stranded oligonucleotide of about 10-50 linked nucleosides in length (e.g., about 10, 15, 20, 25, 30, 35, 40, 45, 46, 47, 48, 49, or 50 linked nucleosides in length), L₁ is a loop region, and D is a single-stranded oligonucleotide of about 10-50 linked nucleosides in length (e.g., about 10, 15, 20, 25, 30, 35, 40, 45, 46, 47, 48, 49, or 50 linked nucleosides in length).

[0312] In some embodiments, C includes a region that is complementary to D such that the two strands hybridize and form a duplex under suitable conditions. Generally, the duplex structure is between 5 and 50 linked nucleosides in length, e.g., between, 5-49, 5-45, 5-40, 5-35, 5-30, 5-25, 5-20, 5-15, 5-10, 5-6, 8-50, 8-45, 8-40, 8-35, 8-30, 8-25, 8-20, 8-15, 8-10, 15-50, 15-45, 15-40, 15-35, 15-30, 15-25, 15-20, 15-16, 20-50, 20-45, 20-40, 20-35, 20-30, 20-25, 25-50, 25-45, 25-40, 25-35, or 25-30 linked nucleosides in length. Ranges and lengths intermediate to the above-recited ranges and lengths are also contemplated to be part of the invention. In some embodiments, C is complementary to at least 5 contiguous nucleobases (e.g., 5, 10, 15, 20, 25, 30, or more contiguous nucleobases) of D, and the oligonucleotide forms a duplex structure of between 10-50 linked nucleosides in length (e.g., at least 10, 15, 20, 25, 30, 35, 40, 45, 46, 47, 48, 49, or 50 linked nucleosides in length).

[0313] In some embodiments, the duplex structure includes at least one mismatch between nucleotides of C and nucleotides of D (e.g., at least 1, 2, 3, 4, or 5 mismatches). In some embodiments, the mismatch is a paired A to C mismatch. In some embodiments, the A nucleoside of the A to C mismatch is on the C strand and the C nucleoside of the A to C mismatch is on the D strand. In some embodiments, the A nucleoside of the A to C mismatch is on the D strand and the C nucleoside of the A to C mismatch is on the C strand. In other embodiments, the mismatch is a paired G-to-G mismatch. In still yet other embodiments, the mismatch is a paired C to A mismatch. In some embodiments, the C nucleoside of the C to A mismatch is on the C strand and the A nucleoside of the C to A mismatch is on the D strand. In some embodiments, the C nucleoside of the C to A mismatch is on the D strand and the A nucleoside of the C to A mismatch is on the C strand. In some embodiments, the mismatch is a paired I to I mismatch. In some embodiments, the mismatch is a paired I to G mismatch. In some embodiments, the I nucleoside of the I to G mismatch is on the C strand and the G nucleoside of the I to G mismatch is on the D strand. In some embodiments, the I nucleoside of the I to G mismatch is on the D strand and the G nucleoside of the I to G mismatch is on the C strand. In some embodiments, the mismatch is a paired G to I mismatch. In some embodiments, the G nucleoside of the G to I mismatch is on the C strand and the I nucleoside of the G to I mismatch is on the D strand. In some embodiments, the G nucleoside of the G to I mismatch is on the D strand and the I nucleoside of the G to I mismatch is on the C strand. In some embodiments, the mismatch includes a nucleoside having an alternative nucleobase. In some embodiments, the alternative nucleobase has the structure:

[chemical structure]

[0314] wherein R¹ is hydrogen, trifluoromethyl, optionally substituted amino, hydroxyl, or optionally substituted C₁-C₆ alkoxy; R² is hydrogen, optionally substituted amino, or optionally substituted C₁-C₆ alkyl; and R³ and R⁴ are, independently, hydrogen, halogen, or optionally substituted C₁-C₆ alkyl, or a salt thereof. In some embodiments, R¹ is a hydrogen bond donor group (e.g., a hydroxyl group, an amino group). In some embodiments, R¹ is a hydrogen bond accepting group (e.g., an alkoxy group).

[0315] In some embodiments, the duplex structure includes two mismatches. In some embodiments, the mismatches are at least three linked nucleosides apart. For example, when mismatches are “separated by 3 nucleotides,” the oligonucleotide includes the structure M₁-N₁—N₂-N₃-M₂, where M₁ is the first mismatch, N₁, N₂, and N₃ are paired nucleobases, and M₂ is the second mismatch. In some embodiments M₁ is a paired A to C mismatch and M₂ is a paired G-to-G mismatch.

[0316] In some embodiments, the loop region, L₁, includes linked nucleosides. In some embodiments, L₁ includes at least one alternative nucleobase, at least one alternative internucleoside linkage, and/or at least one alternative sugar moiety.

[0317] In other embodiments, the loop region has the structure of Formula XVIII:

F¹-(G¹)ⱼ-(H¹)ₖ-(G²)ₘ-(I)-(G³)ₙ-(H²)ₚ-(G⁴)_{q}-F² Formula XVIII,

wherein F¹ is a bond between the loop region and C; F² is a bond between D and a nucleotide or between D and, optionally, a linker; G¹, G², G³, and G⁴ each, independently, is selected from optionally substituted C1-C2 alkyl, optionally substituted C1-C3 heteroalkyl, O, S, and NR^{N}; R^{N} is hydrogen, optionally substituted C₁₋₄ alkyl, optionally substituted C₂₋₄ alkenyl, optionally substituted C₂₋₄ alkynyl, optionally substituted C₂₋₆ heterocyclyl, optionally substituted C₆₋₁₂ aryl, or optionally substituted C₁₋₇ heteroalkyl; C¹ and C² are each, independently, selected from carbonyl, thiocarbonyl, sulphonyl, or phosphoryl; j, k, m, n, p, and q are each, independently, 0 or 1; and I is optionally substituted C₁₋₁₀ alkyl, optionally substituted C₂₋₁₀ alkenyl, optionally substituted C₂₋₁₀ alkynyl, optionally substituted C₂₋₆ heterocyclyl, optionally substituted C₆₋₁₂ aryl, optionally substituted C₂-C₁₀ polyethylene glycol, or optionally substituted C₁₋₁₀ heteroalkyl, or a chemical bond linking F¹-(G¹)ⱼ-(H¹)ₖ-(G²)ₘ-(I)-(G³)ₙ-(H²)ₚ-(G⁴)_{q}-F². In some embodiments, the linker is optional.

[0318] In some embodiments, the loop region, L₁ includes a carbohydrate-containing linking moiety.

[0319] In one embodiment, one or more of the nucleotides of the oligonucleotides of the invention, is naturally-occurring, and does not include, e.g., chemical modifications and/or conjugations known in the art and described herein. In another embodiment, one or more of the nucleotides of an oligonucleotide of the invention is chemically modified to enhance stability or other beneficial characteristics (e.g., alternative nucleotides). Without being bound by theory, it is believed that certain modification can increase nuclease resistance and/or serum stability, or decrease immunogenicity. For example, polynucleotides of the invention may contain nucleotides found to occur naturally in DNA or RNA (e.g., adenine, thymidine, guanosine, cytidine, uridine, or inosine) or may contain nucleotides which have one or more chemical modifications to one or more components of the nucleotide (e.g., the nucleobase, sugar, or phospho-linker moiety). Oligonucleotides of the invention may be linked to one another through naturally-occurring phosphodiester bonds, or may be modified to be covalently linked through phosphorothiorate, 3′-methylenephosphonate, 5′-methylenephosphonate, 3′-phosphoamidate, 2′-5′ phosphodiester, guanidinium, S-methylthiourea, or peptide bonds.

[0320] In some embodiments, C includes at least one alternative nucleobase, at least one alternative internucleoside linkage, and/or at least one alternative sugar moiety. In other embodiments, D includes at least one alternative nucleobase, at least one alternative internucleoside linkage, and/or at least one alternative sugar moiety. In some embodiments, both C and D each include at least one alternative nucleobase, at least one alternative internucleoside linkage, and/or at least one alternative sugar moiety.

[0321] In certain embodiments of the invention, substantially all of the nucleotides of an oligonucleotide of the invention are alternative nucleotides. In other embodiments of the invention, all of the nucleotides of an oligonucleotide of the invention are alternative nucleotides. Oligonucleotides of the invention in which “substantially all of the nucleotides are alternative nucleotides” are largely but not wholly modified and can include no more than 5, 4, 3, 2, or 1 naturally-occurring nucleotides. In still other embodiments of the invention, an oligonucleotide of the invention can include no more than 5, 4, 3, 2, or 1 alternative nucleotides.

[0322] In one embodiment, the oligonucleotides of the invention include an ADAR-recruiting domain having the structure of Formula XXXIV, wherein C is a single-stranded oligonucleotide of 10-50 linked nucleosides in length, L₁ is a loop region, and D is a single-stranded oligonucleotide of 10-50 linked nucleosides in length. In some embodiments, C is complementary to at least 5 contiguous nucleobases of D, and the oligonucleotide includes a duplex structure formed by C and D of between 10-50 linked nucleosides in length. In some embodiments, the duplex structure includes at least one mismatch. In some embodiments, C or D includes at least one alternative nucleobase. In some embodiments, C and D each include at least one alternative nucleobase. In some embodiments, C and/or D, independently, further include at least one alternative internucleoside linkage and/or at least one alternative sugar moiety. In some embodiments, L₁ includes linked nucleotides. In other embodiments, L₁ consists of linked nucleosides. In some embodiments, L₁ includes at least one alternative nucleobase, at least one alternative internucleoside linkage, and/or at least one alternative sugar moiety.

[0323] In another embodiment, the oligonucleotides of the invention include an ADAR-recruiting domain having the structure of Formula XXXIV, wherein C is a single-stranded oligonucleotide of 10-50 linked nucleosides in length, L₁ is a loop region that does not consist of linked nucleosides, and D is a single-stranded oligonucleotide of 10-50 linked nucleosides in length. In some embodiments, C is complementary to at least 5 contiguous nucleobases of D, and the oligonucleotide includes a duplex structure formed by C and D of between 10-50 linked nucleosides in length. In some embodiments, the duplex structure includes at least one mismatch. In some embodiments, L₁ has the structure of Formula VIII, as described herein. In some embodiments, L₁ includes a carbohydrate-containing linking moiety. In some embodiments, C and/or D, independently, include at least one alternative nucleobase, at least one alternative internucleoside linkage, and/or at least one alternative sugar moiety.

[0324] In another embodiment, the oligonucleotides of the invention include an ADAR-recruiting domain having the structure of Formula XXXIV, wherein C is a single-stranded oligonucleotide of 10-50 linked nucleosides in length, L₁ is a loop region including at least one alternative nucleobase or at least one alternative internucleoside linkage, and D is a single-stranded oligonucleotide of 10-50 linked nucleosides in length. In some embodiments, C is complementary to at least 5 contiguous nucleobases of D, and the oligonucleotide includes a duplex structure formed by C and D of between 10-50 linked nucleosides in length. In some embodiments, the duplex structure includes at least one mismatch. In some embodiments, L₁ includes at least one alternative nucleobase and at least one alternative internucleoside linkage.

[0325] In another embodiment, the oligonucleotides of the invention include an ADAR-recruiting domain having the structure of Formula XXXIV, wherein C is a single-stranded oligonucleotide of 10-50 linked nucleosides in length, L₁ is a loop region including, at least one alternative sugar moiety that is not a 2′-O-methyl sugar moiety (e.g., the alternative sugar moiety is selected from the group consisting of a 2′-O—C₁-C₆ alkyl-sugar moiety, a 2′-amino-sugar moiety, a 2′-fluoro-sugar moiety, a 2′-O-MOE sugar moiety, an LNA sugar moiety, an arabino nucleic acid (ANA) sugar moiety, a 2′-fluoro-ANA sugar moiety, a deoxyribose sugar moiety, and a bicyclic nucleic acid), and D is a single-stranded oligonucleotide of 10-50 linked nucleosides in length. In some embodiments, C is complementary to at least 5 contiguous nucleobases of D, and the oligonucleotide includes a duplex structure formed by C and D of between 10-50 linked nucleosides in length. In some embodiments, the duplex structure includes at least one mismatch. In some embodiments, C and/or D, independently, include at least one alternative nucleobase, at least one alternative internucleoside linkage, and/or at least one alternative sugar moiety.

[0326] In some embodiments, C includes a nucleobase sequence having at least 50% sequence identity (e.g., at least 50%, at least 60%, at least 70%, at least 80%, at least 85%, at least 90%, at least 95%, at least 96%, at least 97%, at least 98%, at least 99%, or 100% sequence identity) to a nucleobase sequence set forth in of any one of SEQ ID NOs. 1, 4, 7, 10, 13, 16, 19, 22, 25, 28, 31, and 34, and D includes a nucleobase sequence complementary to the nucleobase sequence of C, wherein the sequence includes at least one mismatch as described herein. In other embodiments, D includes a nucleobase sequence having at least 50% sequence identity (e.g., at least 50%, at least 60%, at least 70%, at least 80%, at least 85%, at least 90%, at least 95%, at least 96%, at least 97%, at least 98%, at least 99%, or 100% sequence identity) to a nucleobase sequence set forth in of any one of SEQ ID NOs. 2, 5, 8, 11, 14, 17, 20, 23, 26, 29, 32, and 35, and C includes a nucleobase sequence complementary to the nucleobase sequence of C, wherein the sequence includes at least one mismatch as described herein. In some embodiments, C-L₁-D includes a nucleobase sequence having at least 50% sequence identity (e.g., at least 50%, at least 60%, at least 70%, at least 80%, at least 85%, at least 90%, at least 95%, at least 96%, at least 97%, at least 98%, at least 99%, or 100% sequence identity) to a nucleobase sequence set forth in of any one of SEQ ID NOs. 3, 6, 9, 12, 15, 18, 21, 24, 27, 30, 33, and 36, wherein the sequence includes at least one mismatch as described herein.

[0327] Nucleobase sequences of SEQ ID NOs. 1-36 are provided below:

TABLE 3

| | |
|---|---|
| GGUGAAUAGUAUAACAAUAU | SEQ ID NO. 1 |
| AUGUUGUUAUAGUAUCCACC | SEQ ID NO. 2 |
| GGUGAAUAGUAUAACAAUAUGCUAAAUGUUGUUAUAGUAUCCACC | SEQ ID NO. 3 |
| GGUGAAGAGGAGAACAAUAU | SEQ ID NO. 4 |
| AUGUUGUUCUCGUCUCCACC | SEQ ID NO. 5 |
| GGUGAAGAGGAGAACAAUAUGCUAAAUGUUGUUCUCGUCUCCACC | SEQ ID NO. 6 |
| GGUGUCGAGAAGAGGAGAACAAUAU | SEQ ID NO. 7 |
| AUGUUGUUCUCGUCUCCUCGACACC | SEQ ID NO. 8 |
| GGUGUCGAGAAGAGGAGAACAAUAUGCUAAAUGUUGUUCUCGUCUCCUCGACACC | SEQ ID NO. 9 |
| GGGUGGAAUAGUAUAACAAUAU | SEQ ID NO. 10 |
| AUGUUGUUAUAGUAUCCCACCU | SEQ ID NO. 11 |
| GGGUGGAAUAGUAUAACAAUAUGCUAAAUGUUGUUAUAGUAUCCCACCU | SEQ ID NO. 12 |
| GUGGAAUAGUAUAACAAUAU | SEQ ID NO. 13 |
| AUGUUGUUAUAGUAUCCCAC | SEQ ID NO. 14 |
| GUGGAAUAGUAUAACAAUAUGCUAAAUGUUGUUAUAGUAUCCCAC | SEQ ID NO. 15 |
| GGUGUCGAGAAUAGUAUAACAAUAU | SEQ ID NO. 16 |
| AUGUUGUUAUAGUAUCCUCGACACC | SEQ ID NO. 17 |
| GGUGUCGAGAAUAGUAUAACAAUAUGCUAAAUGUUGUUAUAGUAUCCUCGACACC | SEQ ID NO. 18 |
| GGGUGGAAUAGUAUAACAAUAU | SEQ ID NO. 19 |
| AUGUUGUUAUAGUAUCCCACCU | SEQ ID NO. 20 |
| GGGUGGAAUAGUAUAACAAUAUGCUAAAUGUUGUUAUAGUAUCCCACCU | SEQ ID NO. 21 |
| GGGUGGAAUAGUAUACCA | SEQ ID NO. 22 |
| UGGUAUAGUAUCCCACCU | SEQ ID NO. 23 |
| GGGUGGAAUAGUAUACCAUUCGUGGUAUAGUAUCCCACCU | SEQ ID NO. 24 |
| GUGGGUGGAAUAGUAUACCA | SEQ ID NO. 25 |
| UGGUAUAGUAUCCCACCUAC | SEQ ID NO. 26 |
| GUGGGUGGAAUAGUAUACCAUUCGUGGUAUAGUAUCCCACCUAC | SEQ ID NO. 27 |
| UGGGUGGAAUAGUAUACCA | SEQ ID NO. 28 |
| UGGUAUAGUAUCCCACCUA | SEQ ID NO. 29 |
| UGGGUGGAAUAGUAUACCAUUCGUGGUAUAGUAUCCCACCUA | SEQ ID NO. 30 |
| GGUGGAAUAGUAUACCA | SEQ ID NO. 31 |
| UGGUAUAGUAUCCCACC | SEQ ID NO. 32 |
| GGUGGAAUAGUAUACCAUUCGUGGUAUAGUAUCCCACC | SEQ ID NO. 33 |
| GUGGAAUAGUAUACCA | SEQ ID NO. 34 |
| UGGUAUAGUAUCCCAC | SEQ ID NO. 35 |
| GUGGAAUAGUAUACCAUUCGUGGUAUAGUAUCCCAC | SEQ ID NO. 36 |

[0328] It will be understood that, although the sequences in SEQ ID NOs. 1-36 are described as unmodified and/or un-conjugated sequences, the RNA of the oligonucleotides of the invention may include any one of the sequences set forth in SEQ ID NOs. 1-36 that is an alternative nucleoside and/or conjugated as described in detail below.

[0329] In some embodiments, the oligonucleotide of the invention may further include a 5′ cap structure. In some embodiments, the 5′ cap structure is a 2,2,7-trimethylguanosine cap.

[0330] An oligonucleotide of the invention can be synthesized by standard methods known in the art as further discussed below, e.g., by use of an automated DNA synthesizer, such as are commercially available from, for example, Biosearch, Applied Biosystems, Inc.

[0331] The oligonucleotide compound can be prepared using solution-phase or solid-phase organic synthesis or both. Organic synthesis offers the advantage that the oligonucleotide including unnatural or alternative nucleotides can be easily prepared. Single-stranded oligonucleotides of the invention can be prepared using solution-phase or solid-phase organic synthesis or both.

[0332] Further, it is contemplated that for any sequence identified herein, further optimization could be achieved by systematically either adding or removing linked nucleosides to generate longer or shorter sequences. Further still, such optimized sequences can be adjusted by, e.g., the introduction of alternative nucleosides, alternative sugar moieties, and/or alternative internucleosidic linkages as described herein or as known in the art, including alternative nucleosides, alternative sugar moieties, and/or alternative internucleosidic linkages as known in the art and/or discussed herein to further optimize the molecule (e.g., increasing serum stability or circulating half-life, increasing thermal stability, enhancing transmembrane delivery, targeting to a particular location or cell type, and/or increasing interaction with RNA editing enzymes (e.g., ADAR)).

[0333] In some embodiments, the one or more ADAR-recruiting domains are GluR2 ADAR-recruiting domains. In some embodiments, the GluR2 ADAR-recruiting domain has the nucleotide sequence of SEQ ID NO. 37, as shown below in the 5′ to 3′ direction:

| (SEQ ID NO. 37) | |
|---|---|
| | GGUGAAUAGUAUAACAAUAUGCUAAAUGUUGUUAUAGUAUCCACC |

[0334] In some embodiments, the oligonucleotide includes the structure of Formula XXI (SEQ ID NO: 37), as shown below:

[chemical structure]

wherein [ASO] includes any of the oligonucleotides of the instant invention, wherein m designates a mismatched nucleotide. In some embodiments, the GluR2 ADAR-recruiting domain has the nucleotide sequence of SEQ ID NO. 38, as shown below in the 5′ to 3′ direction:

(SEQ ID NO. 38)
GGUGAAGAGGAGAACAAUAUGCUAAAUGUUGUUCUCGUCUCCACC

[0335] In some embodiments, the oligonucleotide includes the structure of Formula XXII (SEQ ID NO: 38), as shown below:

[chemical structure]

wherein [ASO] includes any of the oligonucleotides of the instant invention, wherein m designates a mismatched nucleotide. In some embodiments, the GluR2 ADAR-recruiting domain has the nucleotide sequence of SEQ ID NO. 39, as shown below in the 5′ to 3′ direction:

(SEQ ID NO. 39)
GGUGUCGAGAAGAGGAGAACAAUAUGCUAAAUGUUGUUCUCGUCUCCUC
GACACC

[0336] In some embodiments, the oligonucleotide includes the structure of Formula XXIII (SEQ ID NO: 39), as shown below:

[chemical structure]

wherein [ASO] includes any of the oligonucleotides of the instant invention, wherein m designates a mismatched nucleotide.

[0337] In some embodiments, the GluR2 ADAR-recruiting domain has the nucleotide sequence of SEQ ID NO. 40, as shown below in the 5′ to 3′ direction:

(SEQ ID NO. 40)
*s*s*G**GAGAAGAGGAGAA*AA*A*G**AAA*G**G*****G*****
**GA*A**

wherein * is a 2′-O-methyl nucleotide and s is a phosphorothioate internucleoside linkage between two linked nucleotides. In some embodiments, the oligonucleotide includes the structure of Formula XXIV (SEQ ID NO: 40), as shown below:

[chemical structure]

wherein [ASO] includes any one of the oligonucleotides presented herein, wherein * is a 2′-O-methyl nucleotide, wherein s is a phosphorothioate internucleoside linkage, wherein m designates a mismatched nucleotide. In some embodiments, the ADAR-recruiting domains further include at least one nuclease-resistant nucleotide (e.g., 2′-O-methyl nucleotide). In some embodiments, the ADAR-recruiting domains include at least one alternative internucleoside linkage (e.g., a phosphorothioate internucleoside linkage). In some embodiments, the GluR2 ADAR-recruiting domain has the nucleotide sequence of SEQ ID NO. 41, as shown below in the 5′ to 3′ direction:

(SEQ ID NO. 41)
GGGUGGAAUAGUAUAACAAUAUGCUAAAUGUUGUUAUAGUAUCCCACCU

[0338] In some embodiments, the oligonucleotide includes the structure of Formula XXV (SEQ ID NO: 41), as shown below:

[chemical structure]

wherein [ASO] includes any of the oligonucleotides of the instant invention, wherein m designates a mismatched nucleotide. In some embodiments, the GluR2 ADAR-recruiting domain has the nucleotide sequence of SEQ ID NO. 42, as shown below in the 5′ to 3′ direction:

(SEQ ID NO. 42)
GUGGAAUAGUAUAACAAUAUGCUAAAUGUUGUUAUAGUAUCCCAC

[0339] In some embodiments, the oligonucleotide includes the structure of Formula XXVI (SEQ ID NO: 42), as shown below:

[chemical structure]

wherein [ASO] includes any of the oligonucleotides of the instant invention, wherein m designates a mismatched nucleotide. In some embodiments, the GluR2 ADAR-recruiting domain has the nucleotide sequence of SEQ ID NO. 43, as shown below in the 5′ to 3′ direction:

(SEQ ID NO. 43)
GGUGUCGAGAAUAGUAUAACAAUAUGCUAAAUGUUGUUAUAGUAUCCUC
GACACC

[0340] In some embodiments, the oligonucleotide includes the structure of Formula XXVII (SEQ ID NO: 43), as shown below:

[chemical structure]

wherein [ASO] includes any of the oligonucleotides of the instant invention, wherein m designates a mismatched nucleotide. In some embodiments, the GluR2 ADAR-recruiting domain has the nucleotide sequence of SEQ ID NO. 44, as shown below in the 5′ to 3′ direction:

(SEQ ID NO. 44)
GGGUGGAAUAGUAUAACAAUAUGCUAAAUGUUGUUAUAGUAUCCCACCU

[0341] In some embodiments, the oligonucleotide includes the structure of Formula XXVIII (SEQ ID NO: 44), as shown below:

[chemical structure]

wherein [ASO] includes any of the oligonucleotides of the instant invention, wherein m designates a mismatched nucleotide. In some embodiments, the GluR2 ADAR-recruiting domain has the nucleotide sequence of SEQ ID NO. 45, as shown below in the 5′ to 3′ direction:

(SEQ ID NO. 45)
GGGUGGAAUAGUAUACCAUUCGUGGUAUAGUAUCCCACCU

[0342] In some embodiments, the oligonucleotide includes the structure of Formula XXIX (SEQ ID NO: 45), as shown below:

[chemical structure]

wherein [ASO] includes any of the oligonucleotides of the instant invention, wherein m designates a mismatched nucleotide. In some embodiments, the GluR2 ADAR-recruiting domain has the nucleotide sequence of SEQ ID NO. 46, as shown below in the 5′ to 3′ direction:

(SEQ ID NO. 46)
GUGGGUGGAAUAGUAUACCAUUCGUGGUAUAGUAUCCCACCUAC

[0343] In some embodiments, the oligonucleotide includes the structure of Formula XXX (SEQ ID NO: 46), as shown below:

[chemical structure]

wherein [ASO] includes any of the oligonucleotides of the instant invention, wherein m designates a mismatched nucleotide. In some embodiments, the GluR2 ADAR-recruiting domain has the nucleotide sequence of SEQ ID NO. 47, as shown below in the 5′ to 3′ direction:

(SEQ ID NO. 47)
UGGGUGGAAUAGUAUACCAUUCGUGGUAUAGUAUCCCACCUA

[0344] In some embodiments, the oligonucleotide includes the structure of Formula XXXI (SEQ ID NO: 47), as shown below:

[chemical structure]

wherein [ASO] includes any of the oligonucleotides of the instant invention, wherein m designates a mismatched nucleotide. In some embodiments, the GluR2 ADAR-recruiting domain has the nucleotide sequence of SEQ ID NO. 48, as shown below in the 5′ to 3′ direction:

(SEQ ID NO. 48)
GGUGGAAUAGUAUACCAUUCGUGGUAUAGUAUCCCACC

[0345] In some embodiments, the oligonucleotide includes the structure of Formula XXXII (SEQ ID NO: 48), as shown below:

[chemical structure]

wherein [ASO] includes any of the oligonucleotides of the instant invention, wherein m designates a mismatched nucleotide. In some embodiments, the GluR2 ADAR-recruiting domain has the nucleotide sequence of SEQ ID NO. 49, as shown below in the 5′ to 3′ direction:

(SEQ ID NO. 49)
GUGGAAUAGUAUACCAUUCGUGGUAUAGUAUCCCAC

[0346] In some embodiments, the oligonucleotide includes the structure of Formula XXXIII (SEQ ID NO: 49), as shown below:

[chemical structure]

wherein [ASO] includes any of the oligonucleotides of the instant invention, wherein m designates a mismatched nucleotide.

[0347] In some embodiments, the ADAR-recruiting domains are Z-DNA ADAR-recruiting domains. In some embodiments, the ADAR-recruiting domains are MS2 ADAR-recruiting domains. In some embodiments, an MS2 bacteriophage stem-loop structure may be used as an ADAR-recruiting domain (e.g., and MS2 ADAR-recruiting domain). MS2 stem-loops are known to bind the MS2 bacteriophage coat protein, which when fused to the deaminase domain of ADAR (e.g. an ADAR fusion protein) can be used for target-specific deamination. In some embodiments, the MS2 ADAR-recruiting domain has the nucleotide sequence of SEQ ID NO. 50, as shown below in the 5′ to 3′ direction:

(SEQ ID NO. 50)
ACATGAGGATCACCCATGT

[0348] In some embodiments, an ADAR fusion protein is administered to the cell or to the subject using an expression vector construct including a polynucleotide encoding an ADAR fusion protein. In some embodiments, the ADAR fusion protein includes a deaminase domain of ADAR fused to an MS2 bacteriophage coat protein. In some embodiments, the deaminase domain of ADAR is a deaminase domain of ADAR1. In some embodiments, the deaminase domain of ADAR is a deaminase domain of ADAR2. The ADAR fusion protein may be a fusion protein described in Katrekar et al. Nature Methods, 16(3): 239-42 (2019), the ADAR fusion protein of which is herein incorporated by reference

[0349] The nucleic acids featured in the invention can be synthesized and/or modified by methods well established in the art, such as those described in “Current protocols in nucleic acid chemistry,” Beaucage, S. L. et al. (Edrs.), John Wiley & Sons, Inc., New York, N.Y., USA, which is hereby incorporated herein by reference. Alternative nucleotides and nucleosides include those with modifications including, for example, end modifications, e.g., 5′-end modifications (phosphorylation, conjugation, inverted linkages) or 3′-end modifications (conjugation, DNA nucleotides, inverted linkages, etc.); base modifications, e.g., replacement with stabilizing bases, destabilizing bases, or bases that base pair with an expanded repertoire of partners, removal of bases (abasic nucleotides), or conjugated bases; sugar modifications (e.g., at the 2′-position or 4′-position) or replacement of the sugar; and/or backbone modifications, including modification or replacement of the phosphodiester linkages. The nucleobase may also be an isonucleoside in which the nucleobase is moved from the C1 position of the sugar moiety to a different position (e.g. C2, C3, C4, or C5). Specific examples of oligonucleotide compounds useful in the embodiments described herein include, but are not limited to alternative nucleosides containing modified backbones or no natural internucleoside linkages. Nucleotides and nucleosides having modified backbones include, among others, those that do not have a phosphorus atom in the backbone. For the purposes of this specification, and as sometimes referenced in the art, alternative RNAs that do not have a phosphorus atom in their internucleoside backbone can also be considered to be oligonucleosides. In some embodiments, an oligonucleotide will have a phosphorus atom in its internucleoside backbone.

[0350] Alternative internucleoside linkages include, for example, phosphorothioates, chiral phosphorothioates, phosphorodithioates, phosphotriesters, aminoalkylphosphotriesters, methyl and other alkyl phosphonates including 3′-alkylene phosphonates and chiral phosphonates, phosphinates, phosphoramidates including 3′-amino phosphoramidate and aminoalkylphosphoramidates, thionophosphoramidates, thionoalkylphosphonates, thionoalkylphosphotriesters, and boronophosphates having normal 3′-5′ linkages, 2′-5′-linked analogs of these, and those having inverted polarity wherein the adjacent pairs of nucleoside units are linked 3′-5′ to 5′-3′ or 2′-5′ to 5′-2′. Various salts, mixed salts, and free acid forms are also included.

[0351] Representative U.S. patents that teach the preparation of the above phosphorus-containing linkages include, but are not limited to, U.S. Pat. Nos. 3,687,808; 4,469,863; 4,476,301; 5,023,243; 5,177,195; 5,188,897; 5,264,423; 5,276,019; 5,278,302; 5,286,717; 5,321,131; 5,399,676; 5,405,939; 5,453,496; 5,455,233; 5,466,677; 5,476,925; 5,519,126; 5,536,821; 5,541,316; 5,550,111; 5,563,253; 5,571,799; 5,587,361; 5,625,050; 6,028,188; 6,124,445; 6,160,109; 6,169,170; 6,172,209; 6,239,265; 6,277,603; 6,326,199; 6,346,614; 6,444,423; 6,531,590; 6,534,639; 6,608,035; 6,683,167; 6,858,715; 6,867,294; 6,878,805; 7,015,315; 7,041,816; 7,273,933; 7,321,029; and U.S. Pat. RE39464, the entire contents of each of which are hereby incorporated herein by reference.

[0352] Alternative internucleoside linkages that do not include a phosphorus atom therein have backbones that are formed by short chain alkyl or cycloalkyl internucleoside linkages, mixed heteroatoms and alkyl or cycloalkyl internucleoside linkages, or one or more short chain heteroatomic or heterocyclic internucleoside linkages. These include those having morpholino linkages (formed in part from the sugar portion of a nucleoside); siloxane backbones; sulfide, sulfoxide and sulfone backbones; formacetyl and thioformacetyl backbones; methylene formacetyl and thioformacetyl backbones; alkene containing backbones; sulfamate backbones; methyleneimino and methylenehydrazino backbones; sulfonate and sulfonamide backbones; amide backbones; and others having mixed N, O, S, and CH₂ component parts.

[0353] Representative U.S. patents that teach the preparation of the above oligonucleosides include, but are not limited to, U.S. Pat. Nos. 5,034,506; 5,166,315; 5,185,444; 5,214,134; 5,216,141; 5,235,033; 5,64,562; 5,264,564; 5,405,938; 5,434,257; 5,466,677; 5,470,967; 5,489,677; 5,541,307; 5,561,225; 5,596,086; 5,602,240; 5,608,046; 5,610,289; 5,618,704; 5,623,070; 5,663,312; 5,633,360; 5,677,437; and, 5,677,439, the entire contents of each of which are hereby incorporated herein by reference.

[0354] In other embodiments, suitable oligonucleotides include those in which both the sugar and the internucleoside linkage, i.e., the backbone, of the nucleotide units are replaced. The base units are maintained for hybridization with an appropriate nucleic acid target compound. One such oligomeric compound, a mimetic that has been shown to have excellent hybridization properties, is referred to as a peptide nucleic acid (PNA). In PNA compounds, the sugar of a nucleoside is replaced with an amide containing backbone, in particular an aminoethylglycine backbone. The nucleobases are retained and are bound directly or indirectly to aza nitrogen atoms of the amide portion of the backbone. Representative U.S. patents that teach the preparation of PNA compounds include, but are not limited to, U.S. Pat. Nos. 5,539,082; 5,714,331; and 5,719,262, the entire contents of each of which are hereby incorporated herein by reference. Additional PNA compounds suitable for use in the oligonucleotides of the invention are described in, for example, in Nielsen et al., Science, 1991, 254, 1497-1500.

[0355] Some embodiments featured in the invention include oligonucleotides with phosphorothioate backbones and oligonucleotides with heteroatom backbones, and in particular —CH₂—NH—CH₂—, —CH₂—N(CH₃)—O—CH₂— [known as a methylene (methylimino) or MMI backbone], —CH₂—O—N(CH₃)—CH₂—, —CH₂—N(CH₃)—N(CH₃)—CH₂— and —N(CH₃)—CH₂—CH₂-[wherein the native phosphodiester backbone is represented as —O—P—O—CH₂-] of the above-referenced U.S. Pat. No. 5,489,677, and the amide backbones of the above-referenced U.S. Pat. No. 5,602,240. In some embodiments, the oligonucleotides featured herein have morpholino backbone structures of the above-referenced U.S. Pat. No. 5,034,506. In other embodiments, the oligonucleotides described herein include phosphorodiamidate morpholino oligomers (PMO), in which the deoxyribose moiety is replaced by a morpholine ring, and the charged phosphodiester inter-subunit linkage is replaced by an uncharged phophorodiamidate linkage, as described in Summerton, et al., Antisense Nucleic Acid Drug Dev. 1997, 7:63-70.

[0356] Alternative nucleosides and nucleotides can also contain one or more substituted sugar moieties. The oligonucleotides, e.g., oligonucleotides, featured herein can include one of the following at the 2′-position: OH; F; O-, S-, or N-alkyl; O-, S-, or N-alkenyl; O-, S- or N-alkynyl; or O-alkyl-O-alkyl, wherein the alkyl, alkenyl and alkynyl can be substituted or unsubstituted C₁ to C₁₀ alkyl or C₂ to C₁₀ alkenyl and alkynyl. Exemplary suitable modifications include —O[(CH₂)ₙO]ₘCH₃, —O(CH₂)ₙOCH₃, —O(CH₂)ₙ—NH₂, —O(CH₂)ₙCH₃, —O(CH₂)ₙ—ONH₂, and —O(CH₂)ₙ—ON[(CH₂)·CH₃]2, where n and m are from 1 to about 10. In other embodiments, oligonucleotides include one of the following at the 2′ position: C₁ to C₁₀ lower alkyl, substituted lower alkyl, alkaryl, aralkyl, O-alkaryl or O-aralkyl, SH, SCH₃, OCN, Cl, Br, CN, CF₃, OCF₃, SOCH₃, SO₂CH₃, ONO₂, NO₂, N₃, NH₂, heterocycloalkyl, heterocycloalkaryl, aminoalkylamino, polyalkylamino, substituted silyl, an RNA cleaving group, a reporter group, an intercalator, a group for improving the pharmacokinetic properties of an oligonucleotide, or a group for improving the pharmacodynamic properties of an oligonucleotide, and other substituents having similar properties. In some embodiments, the modification includes a 2′-methoxyethoxy (2′-O—CH₂CH₂OCH₃, also known as 2′-O-(2-methoxyethyl) or 2′-O-MOE) (Martin et al., Helv. Chin. Acta, 1995, 78:486-504) i.e., an alkoxy-alkoxy group. 2′-O-MOE nucleosides confer several beneficial properties to oligonucleotides including, but not limited to, increased nuclease resistance, improved pharmacokinetics properties, reduced non-specific protein binding, reduced toxicity, reduced immunostimulatory properties, and enhanced target affinity as compared to unmodified oligonucleotides.

[0357] Another exemplary alternative contains 2′-dimethylaminooxyethoxy, i.e., a —O(CH₂)₂ON(CH₃)₂ group, also known as 2′-DMAOE, as described in examples herein below, and 2′-dimethylaminoethoxyethoxy (also known in the art as 2′-O-dimethylaminoethoxyethyl or 2′-DMAEOE), i.e., 2′-O—(CH₂)₂—O—(CH₂)₂—N(CH₃)₂. Further exemplary alternatives include: 5′-Me-2′-F nucleotides, 5′-Me-2′-OMe nucleotides, 5′-Me-2′-deoxynucleotides, (both R and S isomers in these three families); 2′-alkoxyalkyl; and 2′-NMA (N-methylacetamide).

[0358] Other alternatives include 2′-methoxy (2′-OCH₃), 2′-aminopropoxy (2′-OCH₂CH₂CH₂NH₂) and 2′-fluoro (2′-F). Similar modifications can also be made at other positions on the nucleosides and nucleotides of an oligonucleotide, particularly the 3′ position of the sugar on the 3′ terminal nucleotide or in 2′-5′ linked oligonucleotides and the 5′ position of 5′ terminal nucleotide. Oligonucleotides can also have sugar mimetics such as cyclobutyl moieties in place of the pentofuranosyl sugar. Representative U.S. patents that teach the preparation of such modified sugar structures include, but are not limited to, U.S. Pat. Nos. 4,981,957; 5,118,800; 5,319,080; 5,359,044; 5,393,878; 5,446,137; 5,466,786; 5,514,785; 5,519,134; 5,567,811; 5,576,427; 5,591,722; 5,597,909; 5,610,300; 5,627,053; 5,639,873; 5,646,265; 5,658,873; 5,670,633; and 5,700,920. The entire contents of each of the foregoing are hereby incorporated herein by reference.

[0359] An oligonucleotide for use in the methods of the present invention can also include nucleobase (often referred to in the art simply as “base”) alternatives (e.g., modifications or substitutions). Unmodified or natural nucleobases include the purine bases adenine (A) and guanine (G), and the pyrimidine bases thymine (T), cytosine (C) and uracil (U). Alternative nucleobases include other synthetic and natural nucleobases such as 5-methylcytosine, 5-hydroxymethylcytosine, 5-formylcytosine, 5-carboxycytosine, pyrrolocytosine, dideoxycytosine, uracil, 5-methoxyuracil, 5-hydroxydeoxyuracil, dihydrouracil, 4-thiouracil, pseudouracil, 1-methyl-pseudouracil, deoxyuracil, 5-hydroxybutynl-2′-deoxyuracil, xanthine, hypoxanthine, 7-deaza-xanthine, thienoguanine, 8-aza-7-deazaguanine, 7-methylguanine, 7-deazaguanine, 6-aminomethyl-7-deazaguanine, 8-aminoguanine, 2,2,7-trimethylguanine, 8-methyladenine, 8-azidoadenine, 7-methyladenine, 7-deazaadenine, 3-deazaadenine, 2,6-diaminopurine, 2-aminopurine, 7-deaza-8-aza-adenine, 8-amino-adenine, thymine, dideoxythymine, 5-nitroindole, 2-aminoadenine, 6-methyl and other alkyl derivatives of adenine and guanine, 2-propyl and other alkyl derivatives of adenine and guanine, 2-thiouracil, 2-thiothymine and 2-thiocytosine, 5-halouracil and cytosine, 5-propynyl uracil and cytosine, 6-azo uracil, cytosine and thymine, 4-thiouracil, 8-halo, 8-amino, 8-thiol, 8-thioalkyl, 8-hydroxyl anal other 8-substituted adenines and guanines, 5-halo, particularly 5-bromo, 5-trifluoromethyl and other 5-substituted uracils and cytosines, 8-azaguanine and 8-azaadenine, and 3-deazaguanine. Further nucleobases include those disclosed in U.S. Pat. No. 3,687,808, those disclosed in Modified Nucleosides in Biochemistry, Biotechnology and Medicine, Herdewijn, P. ed. Wiley-VCH, 2008; those disclosed in The Concise Encyclopedia Of Polymer Science And Engineering, pages 858-859, Kroschwitz, J. L, ed. John Wiley & Sons, 1990, these disclosed by Englisch et al., (1991) Angewandte Chemie, International Edition, 30:613, and those disclosed by Sanghvi, Y S., Chapter 15, Antisense Research and Applications, pages 289-302, Crooke, S. T. and Lebleu, B., Ed., CRC Press, 1993. Certain of these nucleobases are particularly useful for increasing the binding affinity of the oligomeric compounds featured in the invention. These include 5-substituted pyrimidines, 6-azapyrimidines, and N-2, N-6 and 0-6 substituted purines, including 2-aminopropyladenine, 5-propynyluracil, and 5-propynylcytosine. 5-methylcytosine substitutions have been shown to increase nucleic acid duplex stability by 0.6-1.2° C. (Sanghvi, Y. S., Crooke, S. T. and Lebleu, B., Eds., Antisense Research and Applications, CRC Press, Boca Raton, 1993, pp. 276-278) and are exemplary base substitutions, even more particularly when combined with 2′-O-methoxyethyl sugar modifications.

[0360] Representative U.S. patents that teach the preparation of certain of the above noted alternative nucleobases as well as other alternative nucleobases include, but are not limited to, the above noted U.S. Pat. Nos. 3,687,808, 4,845,205; 5,130,30; 5,134,066; 5,175,273; 5,367,066; 5,432,272; 5,457,187; 5,459,255; 5,484,908; 5,502,177; 5,525,711; 5,552,540; 5,587,469; 5,594,121, 5,596,091; 5,614,617; 5,681,941; 5,750,692; 6,015,886; 6,147,200; 6,166,197; 6,222,025; 6,235,887; 6,380,368; 6,528,640; 6,639,062; 6,617,438; 7,045,610; 7,427,672; and 7,495,088, the entire contents of each of which are hereby incorporated herein by reference.

[0361] In other embodiments, the sugar moiety in the nucleotide may be a ribose molecule, optionally having a 2′-O-methyl, 2′-O-MOE, 2′-F, 2′-amino, 2′-O-propyl, 2′-aminopropyl, or 2′-OH modification.

[0362] An oligonucleotide for use in the methods of the present invention can include one or more bicyclic sugar moieties. A “bicyclic sugar” is a furanosyl ring modified by the bridging of two atoms. A “bicyclic nucleoside” (“BNA”) is a nucleoside having a sugar moiety including a bridge connecting two carbon atoms of the sugar ring, thereby forming a bicyclic ring system. In certain embodiments, the bridge connects the 4′-carbon and the 2′-carbon of the sugar ring. Thus, in some embodiments an agent of the invention may include one or more locked nucleosides. A locked nucleoside is a nucleoside having a modified ribose moiety in which the ribose moiety includes an extra bridge connecting the 2′ and 4′ carbons. In other words, a locked nucleoside is a nucleoside including a bicyclic sugar moiety including a 4′-CH₂—O-2′ bridge. This structure effectively “locks” the ribose in the 3′-endo structural conformation. The addition of locked nucleosides to oligonucleotides has been shown to increase oligonucleotide stability in serum, and to reduce off-target effects (Grunweller, A. et al., (2003) Nucleic Acids Research 31(12):3185-3193). Examples of bicyclic nucleosides for use in the polynucleotides of the invention include without limitation nucleosides including a bridge between the 4′ and the 2′ ribosyl ring atoms. In certain embodiments, the polynucleotide agents of the invention include one or more bicyclic nucleosides including a 4′ to 2′ bridge. Examples of such 4′ to 2′ bridged bicyclic nucleosides, include but are not limited to 4′-(CH₂)—O-2′ (LNA); 4′-(CH₂)—S-2′; 4′-(CH₂)₂—O-2′ (ENA); 4′-CH(CH₃)—O-2′ (also referred to as “constrained ethyl” or “cEt”) and 4′-CH(CH₂OCH₃)—O-2′ (and analogs thereof; see, e.g., U.S. Pat. No. 7,399,845); 4′-C(CH₃)(CH₃)—O-2′ (and analogs thereof; see e.g., U.S. Pat. No. 8,278,283); 4′-CH₂—N(OCH₃)-2′ (and analogs thereof; see e.g., U.S. Pat. No. 8,278,425); 4′-CH₂—O—N(CH₃)₂-2′ (see, e.g., U.S. Patent Publication No. 2004/0171570); 4′-CH₂—N(R)—O-2′, wherein R is H, C₁-C₁₂ alkyl, or a protecting group (see, e.g., U.S. Pat. No. 7,427,672); 4′-CH₂—C(H)(CH₃)-2′ (see, e.g., Chattopadhyaya et al., J. Org. Chem., 2009, 74, 118-134); and 4′-CH₂—C(═CH₂)-2′ (and analogs thereof; see, e.g., U.S. Pat. No. 8,278,426). The entire contents of each of the foregoing are hereby incorporated herein by reference.

[0363] Additional representative U.S. Patents and US Patent Publications that teach the preparation of locked nucleic acid nucleotides include, but are not limited to, the following: U.S. Pat. Nos. 6,268,490; 6,525,191; 6,670,461; 6,770,748; 6,794,499; 6,998,484; 7,053,207; 7,034,133; 7,084,125; 7,399,845; 7,427,672; 7,569,686; 7,741,457; 8,022,193; 8,030,467; 8,278,425; 8,278,426; 8,278,283; US 2008/0039618; and US 2009/0012281, the entire contents of each of which are hereby incorporated herein by reference.

[0364] Any of the foregoing bicyclic nucleosides can be prepared having one or more stereochemical sugar configurations including for example α-L-ribofuranose and 3-D-ribofuranose (see WO 99/14226).

[0365] An oligonucleotide for use in the methods of the invention can also be modified to include one or more constrained ethyl nucleotides. As used herein, a “constrained ethyl nucleotide” or “cEt” is a locked nucleic acid including a bicyclic sugar moiety including a 4′-CH(CH₃)—O-2′ bridge. In one embodiment, a constrained ethyl nucleotide is in the S conformation referred to herein as “S-cEt.”

[0366] An oligonucleotide for use in the methods of the invention may also include one or more “conformationally restricted nucleotides” (“CRN”). CRN are nucleotide analogs with a linker connecting the C2′ and C4′ carbons of ribose or the C3 and —C5′ carbons of ribose. CRN lock the ribose ring into a stable conformation and increase the hybridization affinity to mRNA. The linker is of sufficient length to place the oxygen in an optimal position for stability and affinity resulting in less ribose ring puckering.

[0367] Representative publications that teach the preparation of certain of the above noted CRN include, but are not limited to, US Patent Publication No. 2013/0190383; and PCT publication WO 2013/036868, the entire contents of each of which are hereby incorporated herein by reference.

[0368] In some embodiments, an oligonucleotide for use in the methods of the invention includes one or more monomers that are UNA (unlocked nucleic acid) nucleotides. UNA is unlocked acyclic nucleic acid, wherein any of the bonds of the sugar has been removed, forming an unlocked “sugar” residue. In one example, UNA also encompasses monomer with bonds between C1′-C4′ have been removed (i.e. the covalent carbon-oxygen-carbon bond between the C1′ and C4′ carbons). In another example, the C2′-C3′ bond (i.e. the covalent carbon-carbon bond between the C2′ and C3′ carbons) of the sugar has been removed (see Nuc. Acids Symp. Series, 52, 133-134 (2008) and Fluiter et al., Mol. Biosyst., 2009, 10, 1039 hereby incorporated by reference).

[0369] Representative U.S. publications that teach the preparation of UNA include, but are not limited to, U.S. Pat. No. 8,314,227; and US Patent Publication Nos. 2013/0096289; 2013/0011922; and 2011/0313020, the entire contents of each of which are hereby incorporated herein by reference.

[0370] The ribose molecule may also be modified with a cyclopropane ring to produce a tricyclodeoxynucleic acid (tricyclo DNA). The ribose moiety may be substituted for another sugar such as 1,5,-anhydrohexitol, threose to produce a threose nucleoside (TNA), or arabinose to produce an arabino nucleoside. The ribose molecule can also be replaced with non-sugars such as cyclohexene to produce cyclohexene nucleoside or glycol to produce glycol nucleosides.

[0371] The ribose molecule can also be replaced with non-sugars such as cyclohexene to produce cyclohexene nucleic acid (CeNA) or glycol to produce glycol nucleic acids (GNA). Potentially stabilizing modifications to the ends of nucleotide molecules can include N-(acetylaminocaproyl)-4-hydroxyprolinol (Hyp-C6-NHAc), N-(caproyl-4-hydroxyprolinol (Hyp-C6), N-(acetyl-4-hydroxyprolinol (Hyp-NHAc), thymidine-2′-O-deoxythymidine (ether), N-(aminocaproyl)-4-hydroxyprolinol (Hyp-C6-amino), 2-docosanoyl-uridine-3″-phosphate, inverted base dT(idT) and others. Disclosure of this modification can be found in PCT Publication No. WO 2011/005861.

[0372] Other alternatives chemistries of an oligonucleotide of the invention include a 5′ phosphate or 5′ phosphate mimic, e.g., a 5′-terminal phosphate or phosphate mimic of an oligonucleotide. Suitable phosphate mimics are disclosed in, for example US Patent Publication No. 2012/0157511, the entire contents of which are incorporated herein by reference.

[0373] Exemplary oligonucleotides for use in the methods of the invention include sugar-modified nucleosides and may also include DNA or RNA nucleosides. In some embodiments, the oligonucleotide includes sugar-modified nucleosides and DNA nucleosides. Incorporation of alternative nucleosides into the oligonucleotide of the invention may enhance the affinity of the oligonucleotide for the target nucleic acid. In that case, the alternative nucleosides can be referred to as affinity enhancing alternative nucleotides.

[0374] In some embodiments, the oligonucleotide includes at least 1 alternative nucleoside, such as at least 2, at least 3, at least 4, at least 5, at least 6, at least 7, at least 8, at least 9, at least 10, at least 11, at least 12, at least 13, at least 14, at least 15 or at least 16 alternative nucleosides. In other embodiments, the oligonucleotides include from 1 to 10 alternative nucleosides, such as from 2 to 9 alternative nucleosides, such as from 3 to 8 alternative nucleosides, such as from 4 to 7 alternative nucleosides, such as 6 or 7 alternative nucleosides. In an embodiment, the oligonucleotide of the invention may include alternatives, which are independently selected from these three types of alternative (alternative sugar moiety, alternative nucleobase, and alternative internucleoside linkage), or a combination thereof. Preferably the oligonucleotide includes one or more nucleosides including alternative sugar moieties, e.g., 2′ sugar alternative nucleosides. In some embodiments, the oligonucleotide of the invention include the one or more 2′ sugar alternative nucleoside independently selected from the group consisting of 2′-O-alkyl-RNA, 2′-O-methyl-RNA, 2′-alkoxy-RNA, 2′-O-methoxyethyl-RNA, 2′-amino-DNA, 2′-fluoro-DNA, ANA, 2′-fluoro-ANA, and BNA (e.g., LNA) nucleosides. In some embodiments, the one or more alternative nucleoside is a BNA.

[0375] In some embodiments, at least 1 of the alternative nucleosides is a BNA (e.g., an LNA), such as at least 2, such as at least 3, at least 4, at least 5, at least 6, at least 7, or at least 8 of the alternative nucleosides are BNAs. In a still further embodiment, all the alternative nucleosides are BNAs.

[0376] In a further embodiment the oligonucleotide includes at least one alternative internucleoside linkage. In some embodiments, the internucleoside linkages within the contiguous nucleotide sequence are phosphorothioate or boronophosphate internucleoside linkages. In some embodiments, all the internucleotide linkages in the contiguous sequence of the oligonucleotide are phosphorothioate linkages. In some embodiments the phosphorothioate linkages are stereochemically pure phosphorothioate linkages. In some embodiments, the phosphorothioate linkages are Sp phosphorothioate linkages. In other embodiments, the phosphorothioate linkages are Rp phosphorothioate linkages.

[0377] In some embodiments, the oligonucleotide for use in the methods of the invention includes at least one alternative nucleoside which is a 2′-O-MOE-RNA, such as 2, 3, 4, 5, 6, 7, 8, 9, or 10 2′-O-MOE-RNA nucleoside units. In some embodiments, the 2′-O-MOE-RNA nucleoside units are connected by phosphorothioate linkages. In some embodiments, at least one of said alternative nucleoside is 2′-fluoro DNA, such as 2, 3, 4, 5, 6, 7, 8, 9, or 10 2′-fluoro-DNA nucleoside units. In some embodiments, the oligonucleotide of the invention includes at least one BNA unit and at least one 2′ substituted alternative nucleoside. In some embodiments of the invention, the oligonucleotide includes both 2′ sugar modified nucleosides and DNA units.

[0378] B. Oligonucleotide Conjugated to Ligands

[0379] Oligonucleotides for use in the methods of the invention may be chemically linked to one or more ligands, moieties, or conjugates that enhance the activity, cellular distribution, or cellular uptake of the oligonucleotide. Such moieties include but are not limited to lipid moieties such as a cholesterol moiety (Letsinger et al., (1989) Proc. Natl. Acid. Sci. USA, 86: 6553-6556), cholic acid (Manoharan et al., (1994) Biorg. Med. Chem. Let., 4:1053-1060), a thioether, e.g., beryl-S-tritylthiol (Manoharan et al., (1992) Ann. N.Y. Acad. Sci., 660:306-309; Manoharan et al., (1993) Biorg. Med. Chem. Let., 3:2765-2770), a thiocholesterol (Oberhauser et al., (1992) Nucl. Acids Res., 20:533-538), an aliphatic chain, e.g., dodecandiol or undecyl residues (Saison-Behmoaras et al., (1991) EMBO J, 10:1111-1118; Kabanov et al., (1990) FEBS Lett., 259:327-330; Svinarchuk et al., (1993) Biochimie, 75:49-54), a phospholipid, e.g., di-hexadecyl-rac-glycerol or triethyl-ammonium 1,2-di-O-hexadecyl-rac-glycero-3-phosphonate (Manoharan et al., (1995) Tetrahedron Lett., 36:3651-3654; Shea et al., (1990) Nucl. Acids Res., 18:3777-3783), a polyamine or a polyethylene glycol chain (Manoharan et al., (1995) Nucleosides & Nucleotides, 14:969-973), or adamantane acetic acid (Manoharan et al., (1995) Tetrahedron Lett., 36:3651-3654), a palmityl moiety (Mishra et al., (1995) Biochim. Biophys. Acta, 1264:229-237), or an octadecylamine or hexylamino-carbonyloxycholesterol moiety (Crooke et al., (1996) J. Pharmacol. Exp. Ther., 277:923-937).

[0380] In one embodiment, a ligand alters the distribution, targeting, or lifetime of an oligonucleotide agent into which it is incorporated. In some embodiments, a ligand provides an enhanced affinity for a selected target, e.g., molecule, cell or cell type, compartment, e.g., a cellular or organ compartment, tissue, organ, or region of the body, as, e.g., compared to a species absent such a ligand.

[0381] Ligands can include a naturally occurring substance, such as a protein (e.g., human serum albumin (HSA), low-density lipoprotein (LDL), or globulin); carbohydrate (e.g., a dextran, pullulan, chitin, chitosan, inulin, cyclodextrin, N-acetylglucosamine, N-acetylgalactosamine, or hyaluronic acid); or a lipid. The ligand can also be a recombinant or synthetic molecule, such as a synthetic polymer, e.g., a synthetic polyamino acid. Examples of polyamino acids include polyamino acid is a polylysine (PLL), poly L-aspartic acid, poly L-glutamic acid, styrene-maleic acid anhydride copolymer, poly(L-lactide-co-glycolied) copolymer, divinyl ether-maleic anhydride copolymer, N-(2-hydroxypropyl)methacrylamide copolymer (HMPA), polyethylene glycol (PEG), polyvinyl alcohol (PVA), polyurethane, poly(2-ethylacryllic acid), N-isopropylacrylamide polymers, or polyphosphazine. Example of polyamines include: polyethylenimine, polylysine (PLL), spermine, spermidine, polyamine, pseudopeptide-polyamine, peptidomimetic polyamine, dendrimer polyamine, arginine, amidine, protamine, cationic ionizable lipid, cationic porphyrin, quaternary salt of a polyamine, or an alpha helical peptide.

[0382] Ligands can also include targeting groups, e.g., a cell or tissue targeting agent, e.g., a lectin, glycoprotein, lipid or protein, e.g., an antibody, that binds to a specified cell type such as a kidney cell. A targeting group can be a thyrotropin, melanotropin, lectin, glycoprotein, surfactant protein A, Mucin carbohydrate, multivalent lactose, multivalent galactose, N-acetyl-galactosamine, N-acetyl-gulucosamine multivalent mannose, multivalent fucose, glycosylated polyaminoacids, multivalent galactose, transferrin, bisphosphonate, polyglutamate, polyaspartate, a lipid, cholesterol, a steroid, bile acid, folate, vitamin B12, vitamin A, biotin, or an RGD peptide or RGD peptide mimetic.

[0383] Other examples of ligands include dyes, intercalating agents (e.g. acridines), cross-linkers (e.g. psoralen, mitomycin C), porphyrins (TPPC4, texaphyrin, Sapphyrin), polycyclic aromatic hydrocarbons (e.g., phenazine, dihydrophenazine), artificial endonucleases (e.g. EDTA), lipophilic molecules, e.g., cholesterol, cholic acid, adamantane acetic acid, 1-pyrene butyric acid, dihydrotestosterone, 1,3-Bis-O(hexadecyl)glycerol, geranyloxyhexyl group, hexadecylglycerol, borneol, menthol, 1,3-propanediol, heptadecyl group, palmitic acid, myristic acid,O3-(oleoyl)lithocholic acid, O3-(oleoyl)cholenic acid, dimethoxytrityl, or phenoxazine) and peptide conjugates (e.g., antennapedia peptide, Tat peptide), alkylating agents, phosphate, amino, mercapto, PEG (e.g., PEG-40K), MPEG, [MPEG]₂, polyamino, alkyl, substituted alkyl, radiolabeled markers, enzymes, haptens (e.g. biotin), transport/absorption facilitators (e.g., aspirin, vitamin E, folic acid), synthetic ribonucleases (e.g., imidazole, bisimidazole, histamine, imidazole clusters, acridine-imidazole conjugates, Eu3+ complexes of tetraazamacrocycles), dinitrophenyl, HRP, or AP.

[0384] Ligands can be proteins, e.g., glycoproteins, or peptides, e.g., molecules having a specific affinity for a co-ligand, or antibodies e.g., an antibody, that binds to a specified cell type such as a hepatic cell. Ligands can also include hormones and hormone receptors. They can also include non-peptidic species, such as lipids, lectins, carbohydrates, vitamins, cofactors, multivalent lactose, multivalent galactose, N-acetyl-galactosamine, N-acetyl-gulucosamine multivalent mannose, or multivalent fucose.

[0385] The ligand can be a substance, e.g., a drug, which can increase the uptake of the oligonucleotide agent into the cell, for example, by disrupting the cell's cytoskeleton, e.g., by disrupting the cell's microtubules, microfilaments, and/or intermediate filaments. The drug can be, for example, taxon, vincristine, vinblastine, cytochalasin, nocodazole, japlakinolide, latrunculin A, phalloidin, swinholide A, indanocine, or myoservin.

[0386] In some embodiments, a ligand attached to an oligonucleotide as described herein acts as a pharmacokinetic modulator (PK modulator). PK modulators include lipophiles, bile acids, steroids, phospholipid analogues, peptides, protein binding agents, PEG, vitamins etc. Exemplary PK modulators include, but are not limited to, cholesterol, fatty acids, cholic acid, lithocholic acid, dialkylglycerides, diacylglyceride, phospholipids, sphingolipids, naproxen, ibuprofen, vitamin E, biotin etc. Oligonucleotides that include a number of phosphorothioate linkages are also known to bind to serum protein, thus short oligonucleotides, e.g., oligonucleotides of about 5 bases, 10 bases, 15 bases, or 20 bases, including multiple of phosphorothioate linkages in the backbone are also amenable to the present invention as ligands (e.g. as PK modulating ligands). In addition, aptamers that bind serum components (e.g. serum proteins) are also suitable for use as PK modulating ligands in the embodiments described herein.

[0387] Ligand-conjugated oligonucleotides of the invention may be synthesized by the use of an oligonucleotide that bears a pendant reactive functionality, such as that derived from the attachment of a linking molecule onto the oligonucleotide (described below). This reactive oligonucleotide may be reacted directly with commercially-available ligands, ligands that are synthesized bearing any of a variety of protecting groups, or ligands that have a linking moiety attached thereto.

[0388] The oligonucleotides used in the conjugates of the present invention may be conveniently and routinely made through the well-known technique of solid-phase synthesis. Equipment for such synthesis is sold by several vendors including, for example, Applied Biosystems (Foster City, Calif.). Any other means for such synthesis known in the art may additionally or alternatively be employed. It is also known to use similar techniques to prepare other oligonucleotides, such as the phosphorothioates and alkylated derivatives.

[0389] In the ligand-conjugated oligonucleotides of the present invention, such as the ligand-molecule bearing sequence-specific linked nucleosides of the present invention, the oligonucleotides and oligonucleosides may be assembled on a suitable DNA synthesizer utilizing standard nucleotide or nucleoside precursors, or nucleotide or nucleoside conjugate precursors that already bear the linking moiety, ligand-nucleotide or nucleoside-conjugate precursors that already bear the ligand molecule, or non-nucleoside ligand-bearing building blocks.

[0390] When using nucleotide-conjugate precursors that already bear a linking moiety, the synthesis of the sequence-specific linked nucleosides is typically completed, and the ligand molecule is then reacted with the linking moiety to form the ligand-conjugated oligonucleotide. In some embodiments, the oligonucleotides or linked nucleosides of the present invention are synthesized by an automated synthesizer using phosphoramidites derived from ligand-nucleoside conjugates in addition to the standard phosphoramidites and non-standard phosphoramidites that are commercially available and routinely used in oligonucleotide synthesis.

[0391] i. Lipid Conjugates

[0392] In one embodiment, the ligand or conjugate is a lipid or lipid-based molecule. Such a lipid or lipid-based molecule preferably binds a serum protein, e.g., human serum albumin (HSA). An HSA binding ligand allows for distribution of the conjugate to a target tissue, e.g., a non-kidney target tissue of the body. For example, the target tissue can be the liver, including parenchymal cells of the liver. Other molecules that can bind HSA can also be used as ligands. For example, neproxin or aspirin can be used. A lipid or lipid-based ligand can (a) increase resistance to degradation of the conjugate, (b) increase targeting or transport into a target cell or cell membrane, and/or (c) can be used to adjust binding to a serum protein, e.g., HSA.

[0393] A lipid-based ligand can be used to inhibit, e.g., control the binding of the conjugate to a target tissue. For example, a lipid or lipid-based ligand that binds to HSA more strongly will be less likely to be targeted to the kidney and therefore less likely to be cleared from the body. A lipid or lipid-based ligand that binds to HSA less strongly can be used to target the conjugate to the kidney.

[0394] In another aspect, the ligand is a moiety, e.g., a vitamin, which is taken up by a target cell, e.g., a proliferating cell. Exemplary vitamins include vitamin A, E, and K.

[0395] ii. Cell Permeation Agents

[0396] In another aspect, the ligand is a cell-permeation agent, preferably a helical cell-permeation agent. Preferably, the agent is amphipathic. An exemplary agent is a peptide such as tat or antennopedia. If the agent is a peptide, it can be modified, including a peptidylmimetic, invertomers, non-peptide or pseudo-peptide linkages, and use of D-amino acids. The helical agent is preferably an alpha-helical agent, which preferably has a lipophilic and a lipophobic phase.

[0397] The ligand can be a peptide or peptidomimetic. A peptidomimetic (also referred to herein as an oligopeptidomimetic) is a molecule capable of folding into a defined three-dimensional structure similar to a natural peptide. The attachment of peptide and peptidomimetics to oligonucleotide agents can affect pharmacokinetic distribution of the oligonucleotide, such as by enhancing cellular recognition and absorption. The peptide or peptidomimetic moiety can be about 5-50 amino acids long, e.g., about 5, 10, 15, 20, 25, 30, 35, 40, 45, or 50 amino acids long.

[0398] A peptide or peptidomimetic can be, for example, a cell permeation peptide, cationic peptide, amphipathic peptide, or hydrophobic peptide (e.g., consisting primarily of Tyr, Trp, or Phe). The peptide moiety can be a dendrimer peptide, constrained peptide or crosslinked peptide. In another alternative, the peptide moiety can include a hydrophobic membrane translocation sequence (MTS). An exemplary hydrophobic MTS-containing peptide is RFGF having the amino acid sequence AAVALLPAVLLALLAP (SEQ ID NO. 51). An RFGF analogue (e.g., amino acid sequence AALLPVLLAAP (SEQ ID NO. 52) containing a hydrophobic MTS can also be a targeting moiety. The peptide moiety can be a “delivery” peptide, which can carry large polar molecules including peptides, oligonucleotides, and protein across cell membranes. For example, sequences from the HIV Tat protein (GRKKRRQRRRPPQ; SEQ ID NO. 53) and the Drosophila Antennapedia protein (RQIKIWFQNRRMKWKK; SEQ ID NO. 54) have been found to be capable of functioning as delivery peptides. A peptide or peptidomimetic can be encoded by a random sequence of DNA, such as a peptide identified from a phage-display library, or one-bead-one-compound (OBOC) combinatorial library (Lam et al., Nature, 354:82-84, 1991). Examples of a peptide or peptidomimetic tethered to an oligonucleotide agent via an incorporated monomer unit for cell targeting purposes is an arginine-glycine-aspartic acid (RGD)-peptide, or RGD mimic. A peptide moiety can range in length from about 5 amino acids to about 40 amino acids. The peptide moieties can have a structural modification, such as to increase stability or direct conformational properties. Any of the structural modifications described below can be utilized.

[0399] An RGD peptide for use in the compositions and methods of the invention may be linear or cyclic, and may be modified, e.g., glycosylated or methylated, to facilitate targeting to a specific tissue(s). RGD-containing peptides and peptidomimetics may include D-amino acids, as well as synthetic RGD mimics. In addition to RGD, one can use other moieties that target the integrin ligand. Some conjugates of this ligand target PECAM-1 or VEGF.

[0400] A cell permeation peptide is capable of permeating a cell, e.g., a microbial cell, such as a bacterial or fungal cell, or a mammalian cell, such as a human cell. A microbial cell-permeating peptide can be, for example, an α-helical linear peptide (e.g., LL-37 or Ceropin P1), a disulfide bond-containing peptide (e.g., α-defensin, β-defensin, or bactenecin), or a peptide containing only one or two dominating amino acids (e.g., PR-39 or indolicidin). A cell permeation peptide can also include a nuclear localization signal (NLS). For example, a cell permeation peptide can be a bipartite amphipathic peptide, such as MPG, which is derived from the fusion peptide domain of HIV-1 gp41 and the NLS of SV40 large T antigen (Simeoni et al., Nucl. Acids Res. 31:2717-2724, 2003).

[0401] iii. Carbohydrate Conjugates

[0402] In some embodiments of the compositions and methods of the invention, an oligonucleotide further includes a carbohydrate. The carbohydrate conjugated oligonucleotide is advantageous for the in vivo delivery of nucleic acids, as well as compositions suitable for in vivo therapeutic use, as described herein. As used herein, “carbohydrate” refers to a compound which is either a carbohydrate per se made up of one or more monosaccharide units having at least 6 carbon atoms (which can be linear, branched or cyclic) with an oxygen, nitrogen or sulfur atom bonded to each carbon atom; or a compound having as a part thereof a carbohydrate moiety made up of one or more monosaccharide units each having at least six carbon atoms (which can be linear, branched or cyclic), with an oxygen, nitrogen or sulfur atom bonded to each carbon atom. Representative carbohydrates include the sugars (mono-, di-, tri- and oligosaccharides containing from about 4, 5, 6, 7, 8, or 9 monosaccharide units), and polysaccharides such as starches, glycogen, cellulose and polysaccharide gums. Specific monosaccharides include C5 and above (e.g., C5, C6, C7, or C8) sugars; di- and trisaccharides include sugars having two or three monosaccharide units (e.g., C5, C6, C7, or C8).

[0403] In one embodiment, a carbohydrate conjugate for use in the compositions and methods of the invention is a monosaccharide.

[0404] In some embodiments, the carbohydrate conjugate further includes one or more additional ligands as described above, such as, but not limited to, a PK modulator and/or a cell permeation peptide.

[0405] Additional carbohydrate conjugates (and linkers) suitable for use in the present invention include those described in PCT Publication Nos. WO 2014/179620 and WO 2014/179627, the entire contents of each of which are incorporated herein by reference.

[0406] iv. Linkers

[0407] In some embodiments, the conjugate or ligand described herein can be attached to an oligonucleotide with various linkers that can be cleavable or non-cleavable.

[0408] Linkers typically include a direct bond or an atom such as oxygen or sulfur, a unit such as NR⁸, C(O), C(O)NH, SO, SO₂, SO₂NH or a chain of atoms, such as, but not limited to, substituted or unsubstituted alkyl, substituted or unsubstituted alkenyl, substituted or unsubstituted alkynyl, arylalkyl, arylalkenyl, arylalkynyl, heteroarylalkyl, heteroarylalkenyl, heteroarylalkynyl, heterocyclylalkyl, heterocyclylalkenyl, heterocyclylalkynyl, aryl, heteroaryl, heterocyclyl, cycloalkyl, cycloalkenyl, alkylarylalkyl, alkylarylalkenyl, alkylarylalkynyl, alkenylarylalkyl, alkenylarylalkenyl, alkenylarylalkynyl, alkynylarylalkyl, alkynylarylalkenyl, alkynylarylalkynyl, alkylheteroarylalkyl, alkylheteroarylalkenyl, alkylheteroarylalkynyl, alkenylheteroarylalkyl, alkenylheteroarylalkenyl, alkenylheteroarylalkynyl, alkynylheteroarylalkyl, alkynylheteroarylalkenyl, alkynylheteroarylalkynyl, alkylheterocyclylalkyl, alkylheterocyclylalkenyl, alkylhererocyclylalkynyl, alkenylheterocyclylalkyl, alkenylheterocyclylalkenyl, alkenylheterocyclylalkynyl, alkynylheterocyclylalkyl, alkynylheterocyclylalkenyl, alkynylheterocyclylalkynyl, alkylaryl, alkenylaryl, alkynylaryl, alkylheteroaryl, alkenylheteroaryl, alkynylhereroaryl, which one or more methylenes can be interrupted or terminated by O, S, S(O), SO₂, N(R⁸), C(O), substituted or unsubstituted aryl, substituted or unsubstituted heteroaryl, substituted or unsubstituted heterocyclic; where R⁸ is hydrogen, acyl, aliphatic or substituted aliphatic. In one embodiment, the linker is between about 1-24 atoms, 2-24, 3-24, 4-24, 5-24, 6-24, 6-18, 7-18, 8-18 atoms, 7-17, 8-17, 6-16, 7-17, or 8-16 atoms.

[0409] A cleavable linking group is one which is sufficiently stable outside the cell, but which upon entry into a target cell is cleaved to release the two parts the linker is holding together. In a preferred embodiment, the cleavable linking group is cleaved at least about 10 times, 20, times, 30 times, 40 times, 50 times, 60 times, 70 times, 80 times, 90 times, or more, or at least about 100 times faster in a target cell or under a first reference condition (which can, e.g., be selected to mimic or represent intracellular conditions) than in the blood of a subject, or under a second reference condition (which can, e.g., be selected to mimic or represent conditions found in the blood or serum).

[0410] Cleavable linking groups are susceptible to cleavage agents, e.g., pH, redox potential, or the presence of degradative molecules. Generally, cleavage agents are more prevalent or found at higher levels or activities inside cells than in serum or blood. Examples of such degradative agents include: redox agents which are selective for particular substrates or which have no substrate specificity, including, e.g., oxidative or reductive enzymes or reductive agents such as mercaptans, present in cells, that can degrade a redox cleavable linking group by reduction; esterases; endosomes or agents that can create an acidic environment, e.g., those that result in a pH of five or lower; enzymes that can hydrolyze or degrade an acid cleavable linking group by acting as a general acid, peptidases (which can be substrate specific), and phosphatases.

[0411] A cleavable linkage group, such as a disulfide bond can be susceptible to pH. The pH of human serum is 7.4, while the average intracellular pH is slightly lower, ranging from about 7.1-7.3. Endosomes have a more acidic pH, in the range of 5.5-6.0, and lysosomes have an even more acidic pH at around 5.0. Some linkers will have a cleavable linking group that is cleaved at a preferred pH, thereby releasing a cationic lipid from the ligand inside the cell, or into the desired compartment of the cell.

[0412] A linker can include a cleavable linking group that is cleavable by a particular enzyme. The type of cleavable linking group incorporated into a linker can depend on the cell to be targeted. For example, a liver-targeting ligand can be linked to a cationic lipid through a linker that includes an ester group. Liver cells are rich in esterases, and therefore the linker will be cleaved more efficiently in liver cells than in cell types that are not esterase-rich. Other cell-types rich in esterases include cells of the lung, renal cortex, and testis.

[0413] Linkers that contain peptide bonds can be used when targeting cell types rich in peptidases, such as liver cells and synoviocytes.

[0414] In general, the suitability of a candidate cleavable linking group can be evaluated by testing the ability of a degradative agent (or condition) to cleave the candidate linking group. It will also be desirable to also test the candidate cleavable linking group for the ability to resist cleavage in the blood or when in contact with other non-target tissues. Thus, one can determine the relative susceptibility to cleavage between a first and a second condition, where the first is selected to be indicative of cleavage in a target cell and the second is selected to be indicative of cleavage in other tissues or biological fluids, e.g., blood or serum. The evaluations can be carried out in cell free systems, in cells, in cell culture, in organ or tissue culture, or in whole animals. It can be useful to make initial evaluations in cell-free or culture conditions and to confirm by further evaluations in whole animals. In preferred embodiments, useful candidate compounds are cleaved at least about 2, 4, 10, 20, 30, 40, 50, 60, 70, 80, 90, or about 100 times faster in the cell (or under in vitro conditions selected to mimic intracellular conditions) as compared to blood or serum (or under in vitro conditions selected to mimic extracellular conditions).

[0415] a. Redox Cleavable Linking Groups

[0416] In one embodiment, a cleavable linking group is a redox cleavable linking group that is cleaved upon reduction or oxidation. An example of reductively cleavable linking group is a disulphide linking group (—S—S—). To determine if a candidate cleavable linking group is a suitable “reductively cleavable linking group,” or for example is suitable for use with a particular oligonucleotide moiety and particular targeting agent one can look to methods described herein. For example, a candidate can be evaluated by incubation with dithiothreitol (DTT), or other reducing agent using reagents know in the art, which mimic the rate of cleavage which would be observed in a cell, e.g., a target cell. The candidates can also be evaluated under conditions which are selected to mimic blood or serum conditions. In one embodiment, candidate compounds are cleaved by at most about 10% in the blood. In other embodiments, useful candidate compounds are degraded at least about 2, 4, 10, 20, 30, 40, 50, 60, 70, 80, 90, or about 100 times faster in the cell (or under in vitro conditions selected to mimic intracellular conditions) as compared to blood (or under in vitro conditions selected to mimic extracellular conditions). The rate of cleavage of candidate compounds can be determined using standard enzyme kinetics assays under conditions chosen to mimic intracellular media and compared to conditions chosen to mimic extracellular media.

[0417] b. Phosphate-Based Cleavable Linking Groups

[0418] In another embodiment, a cleavable linker includes a phosphate-based cleavable linking group. A phosphate-based cleavable linking group is cleaved by agents that degrade or hydrolyze the phosphate group. An example of an agent that cleaves phosphate groups in cells are enzymes such as phosphatases in cells. Examples of phosphate-based linking groups are —O—P(O)(OR^{k})—O—, —O—P(S)(OR^{k})—O—, —O—P(S)(SR^{k})—O—, —S—P(O)(OR^{k})—O—, —O—P(O)(OR^{k})—S—, —S—P(O)(OR^{k})—S—, —O—P(S)(OR^{k})—S—, —S—P(S)(OR^{k})—O—, —O—P(O)(R^{k})—O—, —O—P(S)(R^{k})—O—, —S—P(O)(R^{k})—O—, —S—P(S)(R^{k})—O—, —S—P(O)(R^{k})—S—, —O—P(S)(R^{k})—S—. These candidates can be evaluated using methods analogous to those described above.

[0419] c. Acid Cleavable Linking Groups

[0420] In another embodiment, a cleavable linker includes an acid cleavable linking group. An acid cleavable linking group is a linking group that is cleaved under acidic conditions. In preferred embodiments acid cleavable linking groups are cleaved in an acidic environment with a pH of about 6.5 or lower (e.g., about 6.0, 5.75, 5.5, 5.25, 5.0, or lower), or by agents such as enzymes that can act as a general acid. In a cell, specific low pH organelles, such as endosomes and lysosomes can provide a cleaving environment for acid cleavable linking groups. Examples of acid cleavable linking groups include but are not limited to hydrazones, esters, and esters of amino acids. Acid cleavable groups can have the general formula —C═NN—, C(O)O, or —OC(O). A preferred embodiment is when the carbon attached to the oxygen of the ester (the alkoxy group) is an aryl group, substituted alkyl group, or tertiary alkyl group such as dimethyl pentyl or t-butyl. These candidates can be evaluated using methods analogous to those described above.

[0421] d. Ester-Based Linking Groups

[0422] In another embodiment, a cleavable linker includes an ester-based cleavable linking group. An ester-based cleavable linking group is cleaved by enzymes such as esterases and amidases in cells. Examples of ester-based cleavable linking groups include but are not limited to esters of alkylene, alkenylene and alkynylene groups. Ester cleavable linking groups have the general formula —C(O)O—, or —OC(O)—. These candidates can be evaluated using methods analogous to those described above.

[0423] e. Peptide-Based Cleaving Groups

[0424] In yet another embodiment, a cleavable linker includes a peptide-based cleavable linking group. A peptide-based cleavable linking group is cleaved by enzymes such as peptidases and proteases in cells. Peptide-based cleavable linking groups are peptide bonds formed between amino acids to yield oligopeptides (e.g., dipeptides, tripeptides etc.) and polypeptides. Peptide-based cleavable groups do not include the amide group (—C(O)NH—). The amide group can be formed between any alkylene, alkenylene, or alkynelene. A peptide bond is a special type of amide bond formed between amino acids to yield peptides and proteins. The peptide-based cleavage group is generally limited to the peptide bond (i.e., the amide bond) formed between amino acids yielding peptides and proteins and does not include the entire amide functional group. Peptide-based cleavable linking groups have the general formula —NHCHRAC(O)NHCHRBC(O)—, where RA and RB are the R groups of the two adjacent amino acids. These candidates can be evaluated using methods analogous to those described above.

[0425] In one embodiment, an oligonucleotide of the invention is conjugated to a carbohydrate through a linker. Linkers include bivalent and trivalent branched linker groups. Exemplary oligonucleotide carbohydrate conjugates with linkers of the compositions and methods of the invention include, but are not limited to, those described in formulas 24-35 of PCT Publication No. WO 2018/195165.

[0426] Representative U.S. patents that teach the preparation of oligonucleotide conjugates include, but are not limited to, U.S. Pat. Nos. 4,828,979; 4,948,882; 5,218,105; 5,525,465; 5,541,313; 5,545,730; 5,552,538; 5,578,717, 5,580,731; 5,591,584; 5,109,124; 5,118,802; 5,138,045; 5,414,077; 5,486,603; 5,512,439; 5,578,718; 5,608,046; 4,587,044; 4,605,735; 4,667,025; 4,762,779; 4,789,737; 4,824,941; 4,835,263; 4,876,335; 4,904,582; 4,958,013; 5,082,830; 5,112,963; 5,214,136; 5,082,830; 5,112,963; 5,214,136; 5,245,022; 5,254,469; 5,258,506; 5,262,536; 5,272,250; 5,292,873; 5,317,098; 5,371,241, 5,391,723; 5,416,203, 5,451,463; 5,510,475; 5,512,667; 5,514,785; 5,565,552; 5,567,810; 5,574,142; 5,585,481; 5,587,371; 5,595,726; 5,597,696; 5,599,923; 5,599,928 and 5,688,941; 6,294,664; 6,320,017; 6,576,752; 6,783,931; 6,900,297; 7,037,646; 8,106,022, the entire contents of each of which are hereby incorporated herein by reference.

[0427] In certain instances, the nucleotides of an oligonucleotide can be modified by a non-ligand group. A number of non-ligand molecules have been conjugated to oligonucleotides in order to enhance the activity, cellular distribution, or cellular uptake of the oligonucleotide, and procedures for performing such conjugations are available in the scientific literature. Such non-ligand moieties have included lipid moieties, such as cholesterol (Kubo, T. et al., sBiochem. Biophys. Res. Comm, 2007, 365(1):54-61; Letsinger et al., Proc. Natl. Acad. Sci. USA, 1989, 86:6553), cholic acid (Manoharan et al., Bioorg. Med. Chem. Lett., 1994, 4:1053), a thioether, e.g., hexyl-S-tritylthiol (Manoharan et al., Ann. N.Y. Acad. Sci., 1992, 660:306; Manoharan et al., Bioorg. Med. Chem. Let., 1993, 3:2765), a thiocholesterol (Oberhauser et al., Nucl. Acids Res., 1992, 20:533), an aliphatic chain, e.g., dodecandiol or undecyl residues (Saison-Behmoaras et al., EMBO J., 1991, 10:111; Kabanov et al., FEBS Lett., 1990, 259:327; Svinarchuk et al., Biochimie, 1993, 75:49), a phospholipid, e.g., di-hexadecyl-rac-glycerol or triethylammonium 1,2-di-O-hexadecyl-rac-glycero-3-H-phosphonate (Manoharan et al., Tetrahedron Lett., 1995, 36:3651; Shea et al., Nucl. Acids Res., 1990, 18:3777), a polyamine or a polyethylene glycol chain (Manoharan et al., Nucleosides & Nucleotides, 1995, 14:969), or adamantane acetic acid (Manoharan et al., Tetrahedron Lett., 1995, 36:3651), a palmityl moiety (Mishra et al., Biochim. Biophys. Acta, 1995, 1264:229), or an octadecylamine or hexylamino-carbonyl-oxycholesterol moiety (Crooke et al., J. Pharmacol. Exp. Ther., 1996, 277:923). Representative United States patents that teach the preparation of such oligonucleotide conjugates have been listed above. Typical conjugation protocols involve the synthesis of an oligonucleotide bearing an amino linker at one or more positions of the sequence. The amino group is then reacted with the molecule being conjugated using appropriate coupling or activating reagents. The conjugation reaction can be performed either with the oligonucleotide still bound to the solid support or following cleavage of the oligonucleotide, in solution phase. Purification of the oligonucleotide conjugate by HPLC typically affords the pure conjugate.

### IV. Pharmaceutical Compositions

[0428] The present disclosure also includes pharmaceutical compositions and formulations which include the oligonucleotides of the disclosure. In one embodiment, provided herein are pharmaceutical compositions containing an oligonucleotide, e.g., a guide oligonucleotide, as described herein, and a pharmaceutically acceptable carrier. The pharmaceutical compositions containing the oligonucleotide are useful for treating a subject who would benefit from editing a target gene, e.g., an LRRK2 polynucleotide with a SNP associated with Parkinson's Disease.

[0429] The pharmaceutical compositions of the present disclosure can be administered in a number of ways depending upon whether local or systemic treatment is desired and upon the area to be treated. Administration can be oral, parental, topical (e.g., by a transdermal patch), intranasal, intratracheal, epidermal and transdermal.

[0430] Parenteral administration includes intravenous, intraarterial, subcutaneous, intraperitoneal or intramuscular injection or infusion; subdermal, e.g., via an implanted device; or intracranial, e.g., by intraparenchymal, intrathecal or intraventricular, administration. Parenteral administration may be by continuous infusion over a selected period of time.

[0431] Pharmaceutical compositions and formulations for topical administration can include transdermal patches, ointments, lotions, creams, gels, drops, suppositories, sprays, liquids and powders. Conventional pharmaceutical carriers, aqueous, powder or oily bases, thickeners and the like can be necessary or desirable. Coated condoms, gloves and the like can also be useful. Suitable topical formulations include those in which the oligonucleotides featured in the disclosure are in admixture with a topical delivery agent such as lipids, liposomes, fatty acids, fatty acid esters, steroids, chelating agents and surfactants. Suitable lipids and liposomes include neutral (e.g., dioleoylphosphatidyl DOPE ethanolamine, dimyristoylphosphatidyl choline DMPC, distearolyphosphatidyl choline) negative (e.g., dimyristoylphosphatidyl glycerol DMPG) and cationic (e.g., dioleoyltetramethylaminopropyl DOTAP and dioleoylphosphatidyl ethanolamine DOTMA). Oligonucleotides featured in the disclosure can be encapsulated within liposomes or can form complexes thereto, in particular to cationic liposomes. Alternatively, oligonucleotides can be complexed to lipids, in particular to cationic lipids. Suitable fatty acids and esters include but are not limited to arachidonic acid, oleic acid, eicosanoic acid, lauric acid, caprylic acid, capric acid, myristic acid, palmitic acid, stearic acid, linoleic acid, linolenic acid, dicaprate, tricaprate, monoolein, dilaurin, glyceryl 1-monocaprate, 1-dodecylazacycloheptan-2-one, an acylcarnitine, an acylcholine, or a C₁₋₂₀ alkyl ester (e.g., isopropylmyristate IPM), monoglyceride, diglyceride or pharmaceutically acceptable salt thereof. Topical formulations are described in detail in U.S. Pat. No. 6,747,014, which is incorporated herein by reference.

[0432] Compositions and formulations for parenteral, intraparenchymal (into the brain), intrathecal, intraventricular or intrahepatic administration can include sterile aqueous solutions which can also contain buffers, diluents and other suitable additives such as, but not limited to, penetration enhancers, carrier compounds and other pharmaceutically acceptable carriers or excipients.

[0433] Useful solutions for oral or parenteral administration can be prepared by any of the methods well known in the pharmaceutical art, described, for example; in Remington's Pharmaceutical Sciences, 18th ed. (Mack Publishing Company, 1990). The parenteral preparation can be enclosed in ampoules, disposable syringes or multiple dose vials made of glass or plastic. Formulations also can include, for example, polyalkylene glycols such as polyethylene glycol, oils of vegetable origin, and hydrogenated naphthalenes. Other potentially useful parenteral carriers for these drugs include ethylene-vinyl acetate copolymer particles, osmotic pumps, implantable infusion systems, and liposomes.

[0434] Formulations of the present disclosure suitable for oral administration may be in the form of: discrete units such as capsules, gelatin capsules, sachets, tablets, troches, or lozenges, each containing a predetermined amount of the drug; a powder or granular composition; a solution or a suspension in an aqueous liquid or non-aqueous liquid; or an oil-in-water emulsion or a water-in-oil emulsion. The drug may also be administered in the form of a bolus, electuary or paste. A tablet may be made by compressing or molding the drug optionally with one or more accessory ingredients. Compressed tablets may be prepared by compressing, in a suitable machine, the drug in a free-flowing form such as a powder or granules, optionally mixed by a binder, lubricant, inert diluent, surface active or dispersing agent. Molded tablets may be made by molding; in a suitable machine; a mixture of the powdered drug and suitable carrier moistened with an inert liquid diluent.

[0435] Oral compositions generally include an inert diluent or an edible carrier. For the purpose of oral therapeutic administration, the active compound can be incorporated with excipients. Pharmaceutically compatible binding agents, and/or adjuvant materials can be included as part of the composition. The tablets, pills, capsules, troches and the like can contain any of the following ingredients, or compounds of a similar nature: a binder such as microcrystalline cellulose, gum tragacanth or gelatin; an excipient such as starch or lactose; a disintegrating agent such as alginic acid, Primogel, or corn starch; a lubricant such as magnesium stearate or Sterotes; a glidant such as colloidal silicon dioxide; a sweetening agent such as sucrose or saccharin; or a flavoring agent such as peppermint, methyl salicylate, or orange flavoring.

[0436] Pharmaceutical compositions suitable for injectable use include sterile aqueous solutions (where water soluble) or dispersions and sterile powders for the extemporaneous preparation of sterile injectable solutions or dispersion. For intravenous administration, suitable carriers include physiological saline, bacteriostatic water, Cremophor EL™ (BASF, Parsippany, N.J.) or phosphate buffered saline (PBS). It should be stable under the conditions of manufacture and storage and should be preserved against the contaminating action of microorganisms such as bacteria and fungi. The carrier can be a solvent or dispersion medium containing, for example, water; ethanol, polyol (for example, glycerol, propylene glycol, and liquid polyethylene glycol), and suitable mixtures thereof. The proper fluidity can be maintained, for example, by the use of a coating such as lecithin, by the maintenance of the required particle size in the case of dispersion and by the use of surfactants. In many cases, it will be preferable to include isotonic agents, for example, sugars, polyalcohols such as mannitol, sorbitol, and/or sodium chloride in the composition. Prolonged absorption of the injectable compositions can be brought about by including in the composition an agent which delays absorption, for example, aluminum monostearate and gelatin.

[0437] Sterile injectable solutions can be prepared by incorporating the active compound in the required amount in an appropriate solvent with one or a combination of ingredients enumerated above, as required, followed by filter sterilization. Generally, dispersions are prepared by incorporating the active compound into a sterile vehicle which contains a basic dispersion medium and the required other ingredients from those enumerated above. In the case of sterile powders for the preparation of sterile injectable solutions; methods of preparation include vacuum drying and freeze-drying which yields a powder of the active ingredient plus any additional desired ingredient from a previously sterile-filtered solution thereof.

[0438] Formulations suitable for intra-articular administration may be in the form of a sterile aqueous preparation of the drug that may be in microcrystal line form, for example, in the form of an aqueous microcrystalline suspension. Liposomal formulations or biodegradable polymer systems may also be used to present the drug for both intra-articular and ophthalmic administration.

[0439] Systemic administration also can be by transmucosal or transdermal means. For transmucosal or transdermal administration, penetrants appropriate to the barrier to be permeated are used in the formulation. Such penetrants generally are known in the art, and include, for example, for transmucosal administration, detergents and bile salts. Transmucosal administration can be accomplished through the use of nasal sprays or suppositories. For transdermal administration, the active compounds typically are formulated into ointments, salves, gels, or creams as generally known in the art.

[0440] The active compounds may be prepared with carriers that will protect the compound against rapid elimination from the body, such as a controlled release formulation, including implants and microencapsulated delivery systems. Biodegradable, biocompatible polymers can be used; such as ethylene vinyl acetate, polyanhydrides, polyglycolic acid, collagen, polyorthoesters, and polylactic acid. Methods for preparation of such formulations will be apparent to those skilled in the art. Liposomal suspensions can also be used as pharmaceutically acceptable carriers. These can be prepared according to methods known to those skilled in the art, for example, as described in U.S. Pat. No. 4,522,811.

[0441] Oral or parenteral compositions can be formulated in dosage unit form for ease of administration and uniformity of dosage. Dosage unit form refers to physically discrete units suited as unitary dosages for the subject to be treated; each unit containing a predetermined quantity of active compound calculated to produce the desired therapeutic effect in association with the required pharmaceutical carrier. The specification for the dosage unit forms of the disclosure are dictated by and directly dependent on the unique characteristics of the active compound and the particular therapeutic effect to be achieved, and the limitations inherent in the art of compounding such an active compound for the treatment of individuals. Furthermore, administration can be by periodic injections of a bolus, or can be made more continuous by intravenous, intramuscular or intraperitoneal administration from an external reservoir (e.g., an intravenous bag).

[0442] Where the active compound is to be used as part of a transplant procedure, it can be provided to the living tissue or organ to be transplanted prior to removal of tissue or organ from the donor. The compound can be provided to the donor host. Alternatively, or in addition, once removed from the donor, the organ or living tissue can be placed in a preservation solution containing the active compound. In all cases, the active compound can be administered directly to the desired tissue, as by injection to the tissue, or it can be provided systemically, either by oral or parenteral administration, using any of the methods and formulations described herein and/or known in the art. Where the drug comprises part of a tissue or organ preservation solution, any commercially available preservation solution can be used to advantage. For example, useful solutions known in the art include Collins solution, Wisconsin solution, Belzer solution, Eurocollins solution and lactated Ringer's solution.

[0443] The pharmaceutical formulations of the present disclosure, which can conveniently be presented in unit dosage form, can be prepared according to conventional techniques well known in the pharmaceutical industry. Such techniques include the step of bringing into association the active ingredients with the pharmaceutical carrier(s) or excipient(s). In general, the formulations are prepared by uniformly and intimately bringing into association the active ingredients with liquid carriers or finely divided solid carriers or both, and then, if necessary, shaping the product.

[0444] The compositions of the present disclosure can be formulated into any of many possible dosage forms such as, but not limited to, tablets, capsules, gel capsules, liquid syrups, soft gels, suppositories, and enemas. The compositions of the present disclosure can also be formulated as suspensions in aqueous, non-aqueous or mixed media. Aqueous suspensions can further contain substances which increase the viscosity of the suspension including, for example, sodium carboxymethylcellulose, sorbitol or dextran. The suspension can also contain stabilizers.

[0445] The compositions of the present disclosure can also be prepared and formulated in additional formulations, such as emulsions or microemulsions, or be incorporated into a particle, e.g., a microparticle, which can be produced by spray-drying, or other methods including lyophilization, evaporation, fluid bed drying, vacuum drying, or a combination of these techniques. Penetration enhancers, e.g., surfactants, fatty acids, bile salts, chelating agents, and non-chelating non-surfactants, may be added in order to effect the efficient delivery of the compositions of the present disclosure, e.g., the delivery of the oligonucleotides, to the subject. Agents that enhance uptake of oligonucleotide agents at the cellular level can also be added to the pharmaceutical and other compositions of the present disclosure, such as, cationic lipids, e.g., lipofectin, cationic glycerol derivatives, and polycationic molecules, e.g., polylysine.

[0446] The pharmaceutical composition of the present disclosure may also include a pharmaceutical carrier or excipient. A pharmaceutical carrier or excipient is a pharmaceutically acceptable solvent, suspending agent or any other pharmacologically inert vehicle for delivering one or more nucleic acids to an animal. The excipient can be liquid or solid and is selected, with the planned manner of administration in mind, so as to provide for the desired bulk, consistency, etc., when combined with a nucleic acid and the other components of a given pharmaceutical composition. Typical pharmaceutical carriers include, but are not limited to, binding agents (e.g., pregelatinized maize starch, polyvinylpyrrolidone or hydroxypropyl methylcellulose, etc.); fillers (e.g., lactose and other sugars, microcrystalline cellulose, pectin, gelatin, calcium sulfate, ethyl cellulose, polyacrylates or calcium hydrogen phosphate, etc.); lubricants (e.g., magnesium stearate, talc, silica, colloidal silicon dioxide, stearic acid, metallic stearates, hydrogenated vegetable oils, corn starch, polyethylene glycols, sodium benzoate, sodium acetate, etc.); disintegrants (e.g., starch, sodium starch glycolate, etc.); and wetting agents (e.g., sodium lauryl sulphate, etc).

[0447] Formulations for topical administration of nucleic acids can include sterile and non-sterile aqueous solutions, non-aqueous solutions in common solvents such as alcohols, or solutions of the nucleic acids in liquid or solid oil bases. The solutions can also contain buffers, diluents and other suitable additives. Pharmaceutically acceptable organic or inorganic excipients suitable for non-parenteral administration which do not deleteriously react with nucleic acids can be used. Suitable pharmaceutically acceptable excipients include, but are not limited to, water, salt solutions, alcohol, polyethylene glycols, gelatin, lactose, amylose, magnesium stearate, talc, silicic acid, viscous paraffin, hydroxymethylcellulose, polyvinylpyrrolidone and the like.

[0448] Toxicity and therapeutic efficacy of the compositions can be determined by standard pharmaceutical procedures in cell cultures or experimental animals, e.g., for determining the LD₅₀ (the dose lethal to 50% of the population) and the ED₅₀ (the dose therapeutically effective in 50% of the population). Compounds that exhibit high therapeutic indices are preferred. The data obtained from cell culture assays and animal studies can be used in formulating a range of dosage for use in humans.

[0449] The dosage of the compositions (e.g., a composition including an oligonucleotide) described herein, can vary depending on many factors, such as the pharmacodynamic properties of the compound; the mode of administration; the age, health, and weight of the recipient; the nature and extent of the symptoms; the frequency of the treatment, and the type of concurrent treatment, if any; and the clearance rate of the compound in the animal to be treated. One of skill in the art can determine whether to administer the composition and tailor the appropriate dosage and/or therapeutic regimen of treatment with the composition based on the above factors. The compositions described herein may be administered initially in a suitable dosage that may be adjusted as required, depending on the clinical response. In some embodiments, the dosage of a composition (e.g., a composition including an oligonucleotide) is a prophylactically or a therapeutically effective amount. In some embodiments, treatment of a subject with a therapeutically effective amount of a composition can include a single treatment or a series of treatments. In addition, it is to be understood that the initial dosage administered may be increased beyond the above upper level in order to rapidly achieve the desired blood-level or tissue level, or the initial dosage may be smaller than the optimum and the daily dosage may be progressively increased during the course of treatment depending on the particular situation. If desired, the daily dose may also be divided into multiple doses for administration, for example, two to four times per day.

[0450] The pharmaceutical compositions of the disclosure may be administered in dosages sufficient to edit a target gene, e.g., an LRRK2 polynucleotide, and/or treat Parkinson's Disease. In therapeutic use for treating, preventing, or combating, neurodegeneration in subjects, the compounds or pharmaceutical compositions thereof will be administered orally or parenterally at a dosage to obtain and maintain a concentration, that is, an amount, or blood-level or tissue level of active component in the animal undergoing treatment which will be effective. The term “effective amount” is understood to mean that the compound of the disclosure is present in or on the recipient in an amount sufficient to elicit biological activity. Generally, an effective amount of dosage of active component will be in the range of from about 1 μg/kg to about 100 mg/kg, preferably from about 10 μg/kg to about 10 mg/kg, more preferably from about 100 μg/kg to about 1 mg/kg of body weight per day.

### V. Kits

[0451] In certain aspects, the instant disclosure provides kits that include a pharmaceutical formulation including an oligonucleotide agent capable of effecting an adenosine deaminase acting on RNA (ADAR)-mediated adenosine to inosine alteration of a SNP associated with a disease, e.g., Parkinson's Disease, and a package insert with instructions to perform any of the methods described herein.

[0452] In some embodiments, the kits include instructions for using the kit to edit an LRRK2 polynucleotide comprising a SNP associated with Parkinson's Disease. In other embodiments, the kits include instructions for using the kit to edit an LRRK2 polynucleotide comprising a SNP associated with Parkinson's Disease and to treat Parkinson's Disease. The instructions will generally include information about the use of the kit for editing nucleic acid molecules. In other embodiments, the instructions include at least one of the following: precautions; warnings; clinical studies; and/or references. The instructions may be printed directly on the container (when present), or as a label applied to the container, or as a separate sheet, pamphlet, card, or folder supplied in or with the container. In a further embodiment, a kit can comprise instructions in the form of a label or separate insert (package insert) for suitable operational parameters.

[0453] In some embodiments, the kit includes a pharmaceutical formulation including an oligonucleotide agent capable of effecting an ADAR-mediated adenosine to inosine alteration of a SNP associated with a disease, e.g., Parkinson's Disease, an additional therapeutic agent, and a package insert with instructions to perform any of the methods described herein.

[0454] The kit may be packaged in a number of different configurations such as one or more containers in a single box. The different components can be combined, e.g., according to instructions provided with the kit. The components can be combined according to a method described herein, e.g., to prepare and administer a pharmaceutical composition.

[0455] In some embodiments, the kit can comprise one or more containers with appropriate positive and negative controls or control samples, to be used as standard(s) for detection, calibration, or normalization.

[0456] The kit can further comprise a second container comprising a pharmaceutically-acceptable buffer, such as (sterile) phosphate-buffered saline, Ringer's solution, or dextrose solution; and other suitable additives such as penetration enhancers, carrier compounds and other pharmaceutically acceptable carriers or excipients, as described herein. It can further include other materials desirable from a commercial and user standpoint, including other buffers, diluents, filters, and package inserts with instructions for use. The kit can also include a drug delivery system such as liposomes, micelles, nanoparticles, and microspheres, as described herein. The kit can further include a delivery device, e.g., for delivery to the central nervous system, such as needles, syringes, pumps, and package inserts with instructions for use.

[0457] This invention is further illustrated by the following examples which should not be construed as limiting. The entire contents of all references, patents and published patent applications cited throughout this application, as well as the Figures and the Sequence Listing, are hereby incorporated herein by reference.

### EXAMPLES

### Example 1. Reversing an Amino Acid Substitution Mutation G2019S in the LRRK2 Transcript by Targeted A to I Editing for the Treatment of Parkinson's Disease

[0458] Guide oligonucleotides were chemically synthesized on an automated RNA/DNA synthesizer using standard β-cyanoethylphosphoramidite chemistry and a universal solid support such as controlled pore glass (CPG). 5′-O-DMT-3′-phosphoramidite RNA, 2′-O-methyl-RNA, 2′-Fluoro-arabinose-RNA (FANA) and DNA monomers, i.e., A, C, G, U, and T, were purchased from commercial sources. All oligonucleotides were synthesized by BioSpring GmbH (Frankfurt, Germany) at a 200 nmol scale. After the synthesis, oligonucleotides were cleaved from the solid support, deprotected, and purified by an HPLC system using standard protocols. Oligonucleotides were desalted, dialyzed, and lyophilized. The purity of each lyophilized oligo was >90% as determined by analytical reversed-phase HPLC. The sequence integrity of the oligonucleotides was determined by ESI-MS.

[0459] Human ADAR2 coding sequence (NM_001112.4; SEQ ID NO: 55), human ADAR1p110 (NM_001111.5; SEQ ID NO: 56) and human LRRK2 G2019S (NM_198578.4; SEQ ID NO: 58) sequences (ORF only), were cloned into pcDNA3.1 plasmid under the control of the CMV promoter using BamHI and XbaI restriction sites (Quintara Bio, Berkeley, CA) and the correct insert was sequence verified. Recombinant Myc-tag is placed in the N-terminus of the coding sequence of the 2 ADAR genes. For the human LRRK2 G2019S construct, recombinant HA-tag is placed in-frame at the C-terminus of the coding sequence. The plasmids will henceforth be denoted as ADAR2/pcDNA3.1, ADAR1p110/pcDNA3.1, or LRRK2/pcDNA3.1. Henceforth, the coding sequences for all genes can be found in the informal Sequence Listing at the end of the application. For editing experiments, 2 μg of ADAR2/pcDNA3.1 or ADAR1p110/pcDNA3.1 plasmid and 10 μg of LRRK2/pcDNA3.1 plasmid were transfected into 5×10⁶ HEK293T cells (ATCC) using 25 μL of Lipofectamine 3000 and 24 μL of P3000 (Life Technologies) per 10 cm dish. After 4 hours, the culture media was replenished with fresh warmed media (DMEM High Glucose; Life Technologies). 12-16 hours after transfection, the transfected HEK293T cells were transfected with guide oligonucleotides such that the final concentration in each well was 100 nM. All transfections were carried out with Lipofectamine 3000 (0.4 μL/per well) in a 96-well format according to the manufacturer's instructions. 12-16 hours after the second transfection, the cells were washed once with ice cold PBS and total mRNA isolation was performed using Dyna Beads mRNA Direct Kit (Life Technologies) adapted for KingFisher Flex Purification (Life Technologies) according to the manufacturer's instructions. The samples were treated with TURBO DNase (Life Technologies) prior to elution. The resultant isolated mRNA was used for cDNA synthesis using SuperScript IV Vilo according to the manufacturer's instructions (Life Technologies). One μl of the cDNA was used as template for PCR (Platinum II Hot-Start PCR Master Mix; Life Technologies) using gene specific primers to generate an amplicon for Sanger sequencing (Table 4). Sanger sequencing was performed by Quintara Biosciences (Berkeley, CA). Adenosine to inosine editing yields were quantified by measuring the peak height of adenosine and guanosine and dividing the guanosine peak height by the total peak height measurements of adenosine and guanosine combined.

TABLE 4
Primers Used for RT-PCR

| | | SEQ |
|---|---|---|
| Name | Sequence (5′ to 3′) | ID NO. |
| LRRK2 Forward | CCCGGATGTTGGTGATG | 59 |
| LRRK2 Reverse | AGTTGTCAAAATGTCATAGAGTAGT | 60 |

[0460] ADAR mediated editing using exemplary modified guide oligonucleotides targeting human LRRK2 (G2019S) are described in Table 5.

[0461] Abbreviations of various modifications are shown in the table below. For example, A, C, G and U are ribonucleosides; dA, dC, dG and dT are deoxyribonucleosides; mA, mC, mG and mU are 2′-O-methyl ribonucleosides; fA, fC, fG and fU are 2′-fluoroarabinonucleosides (FANA). The DNA triplet (dTdCdG) and the FANA triplet (fUfCfG) are indicated in bold. Mismatches are indicated in bold and underline. GluR refers to the natural ADAR substrate, GluR2 receptor pre-mRNA or longer RNA sequences that form a hairpin structure similar to GluR2.

| Modification | Abbreviation |
|---|---|
| RNA | rN |
| DNA | dN |
| 2′-O-Methyl(2′-OMe) | mN |
| 2′-F-arabinose (FANA) | fN |
| 2′-F-RNA | FN |
| 2′-O-Methoxyethyl (MOE) | MN |
| Locked Nucleic Acids (LNA) | LN |
| Abasic | ds |
| RNA-Abasic | rs |
| 2′-OMe-Abasic | mS |
| 5-Methyl-rC | rmC |
| 5-Methyl-dC | dmC |
| 5-Methyl-2′-OMe-C | mmC |
| (S)-Glycol Nucleic Acid (S-GNA) | sgN |
| (R)-Glycol Nucleic Acid (R-GNA) | rgN |
| DNA α-anomer | αN |
| Arabinose | aN |
| 2′-OMe-Arabinose | amN |
| Flexible Nucleic Acid (FNA) | fxN |
| Serineol Nucleic Acid | sN |
| β-D-homoDNA | hdN |
| β-D-HNA | hN |
| Phosphorothioate | * |
| internucleoside linkage | |

| SEQ | | | | | ADAR2 | | ADAR1 |
|---|---|---|---|---|---|---|---|
| ID | Oligo | | | ADAR2% | St. | ADAR1% | St. |
| NO. | ID | Length | Oligo Sequence | editing | Dev. | editing | Dev. |
| | | | Human LRRK2 G2019S Antisense-gRNA | | | | |
| 61 | KB- | 50 | 5′- | 67.2 | 5.6 | 74.8 | 8.8 |
| | 026- | | mU*mU*mU*mU*mUmAmUmCmCmCmCmAmU | | | | |
| | | | mUmCmUmAmCmAmGmCmAmGmUmAmCmU | | | | |
| | 681 | | mGmAmGmCmAmAmUmGdCdCdGmUmAmGm | | | | |
| | | | UmCmAmGmC*mA*mA*mU*mC-3′ | | | | |
| 62 | KB- | 50 | 5′- | 72.2 | 1.8 | 64.8 | 6.4 |
| | 026- | | mU*mU*mU*mU*mUmAmUmCmCmCmCmAmU | | | | |
| | 682 | | mumCmUmAmCmAmGmGmAmGmUmCmCmU | | | | |
| | | | mGmAmGmCmAmAmUmGdCdCdGmUmAmGm | | | | |
| | | | UmCmAmGmC*mA*mA*mU*mC-3′ | | | | |
| 63 | KB- | 50 | 5′- | 72.1 | 1.1 | 75.4 | 8.9 |
| | 026- | | mU*mU*mU*mU*mUmAmUmCmCmCmCmAmU | | | | |
| | 683 | | mUmCmUmAmCmAmAmCmAmGmCmAmCmU | | | | |
| | | | mGmAmGmCmAmAmUmGdCdCdGmUmAmGm | | | | |
| | | | UmCmAmGmC*mA*mA*mU*mC-3′ | | | | |
| 64 | KB- | 50 | 5′- | 76.2 | 0.3 | 74.9 | 12.8 |
| | 026- | | mU*mU*mU*mU*mUmAmUmCmCmCmCmAmU | | | | |
| | 684 | | mUmCmCmAmCmAmAmCmAmGmUmAmCmU | | | | |
| | | | mGmAmGmCmAmAmUmGdCdCdGmUmAmGm | | | | |
| | | | UmCmAmGmC*mA*mA*mU*mC-3′ | | | | |
| 65 | KB- | 50 | 5′- | 86.3 | 3.9 | 73.2 | 1.6 |
| | 026- | | mU*mU*mU*mU*mUmAmUmCmCmCmCmAmU | | | | |
| | | | mUmCmUmAmCmAmGmCmAmGmUmAmCmU | | | | |
| | 685 | | mGmAmGmCmAmAmUmGlCfCfGmUmAmGmU | | | | |
| | | | mCmAmGmC*mA*mA*mU*mC-3′ | | | | |
| 66 | KB- | 50 | 5′- | 91.8 | 0.8 | 86.5 | 1.6 |
| | 026- | | mU*mU*mU*mU*mUmAmUmCmCmCmCmAmU | | | | |
| | 686 | | mUmCmCmAmCmAmAmCmAmGmUmAmCmU | | | | |
| | | | mGmAmGmCmAmAmUmGlCfCfGmUmAmGmU | | | | |
| | | | mCmAmGmC*mA*mA*mU*mC-3′ | | | | |
| | | | Human LRRK2 G2019S GluR-gRNA | | | | |
| 67 | KB- | 66 | 5′- | 85.9 | 9.5 | 73.9 | 7.0 |
| | 026- | | mG*mU*mG*mG*mAmAmUmAmGmUmAmUmA | | | | |
| | 687 | | mAmCmAmAmUmAmUmGmCmUmAmAmAmUm | | | | |
| | | | GmUmUmGmUmUmAmUmAmGmUmAmUmCm | | | | |
| | | | CmCmAmC- | | | | |
| | | | mGmCmAmAmUmGdCdCdGmUmAmGmUmCm | | | | |
| | | | AmGmC*mA*mA*mU*mC-3 | | | | |
| 68 | KB- | 66 | 5′- | 87.9 | 0.6 | 79.2 | 3.0 |
| | 026- | | mG*mU*mG*mG*mAmAmUmAmGmUmAmUmA | | | | |
| | 688 | | mAmCmAmAmAmUmAmUmGmCmUmAmAmAmUm | | | | |
| | | | GmUmUmGmUmUmAmUmAmGmUmAmUmCm | | | | |
| | | | CmCmAmC- | | | | |
| | | | mGmCmAmAmUmGlCfCfGmUmAmGmUmCmA | | | | |
| | | | mGmC*mA*mA*mU*mC-3′ | | | | |
| | | | Human LRRK2 G2019S Antisense-gRNA | | | | |
| | | | (35-3-12 Construct) | | | | |
| 69 | | 50 | 5′- | | | | |
| | | | mU*mU*mU*mU*mUmAmUmCmCmCmCmAmU | | | | |
| | | | mUmCmUmAmCmAmGmCmAmGmUmAmCmU | | | | |
| | | | mGmAmGmCmAmAmUmGdCdCdGmUmAmGm | | | | |
| | | | UmCmAmGmC*mA*mA*mU*mC-3′ | | | | |
| 70 | | 50 | 5′- | | | | |
| | | | mU*mU*mU*mU*mUmAmUmCmCmCmCmAmU | | | | |
| | | | mUmCmUmAmCmAmGmCmAmGmUmAmCmU | | | | |
| | | | mGmAmGmCmAmAmUmGdCdCdAmUmAmGm | | | | |
| | | | UmCmAmGmC*mA*mA*mU*mC-3′ | | | | |
| 71 | | 50 | 5′- | | | | |
| | | | mU*mU*mU*mU*mUmAmUmCmCmCmCmAmU | | | | |
| | | | mUmCmUmAmCmAmGmCmAmGmUmAmCmU | | | | |
| | | | mGmAmGmCmAmAmUmGlCdCdAmUmAmGm | | | | |
| | | | UmCmAmGmC*mA*mA*mU*mC-3′ | | | | |
| 72 | | 50 | 5′- | | | | |
| | | | mU*mU*mU*mU*mUmAmumCmCmCmCmAmU | | | | |
| | | | mUmCmUmAmCmAmGmCmAmGmUmAmCmU | | | | |
| | | | mGmAmGmCmAmAmUmGdCfCdAmUmAmGm | | | | |
| | | | UmCmAmGmC*mA*mA*mU*mC-3′ | | | | |
| 73 | | 50 | 5′- | | | | |
| | | | mU*mU*mU*mU*mUmAmUmCmCmCmCmAmU | | | | |
| | | | mUmCmUmAmCmAmGmCmAmGmUmAmCmU | | | | |
| | | | mGmAmGmCmAmAmUmGdCdClAmUmAmGm | | | | |
| | | | UmCmAmGmC*mA*mA*mU*mC-3′ | | | | |
| 74 | | 50 | 5′- | | | | |
| | | | mU*mU*mU*mU*mUmAmUmCmCmCmCmAmU | | | | |
| | | | mUmCmUmAmCmAmGmCmAmGmUmAmCmU | | | | |
| | | | mGmAmGmCmAmAmUmGdClClAmUmAmGmU | | | | |
| | | | mCmAmGmC*mA*mA*mU*mC-3′ | | | | |
| 75 | | 50 | 5′- | | | | |
| | | | mU*mU*mU*mU*mUmAmCmCmCmCmCmAmU | | | | |
| | | | mUmCmUmAmCmAmGmCmAmGmUmAmCmU | | | | |
| | | | mGmAmGmCmAmAmUmGlClCdAmUmAmGmU | | | | |
| | | | mCmAmGmC*mA*mA*mU*mC-3′ | | | | |
| 76 | | 50 | 5′- | | | | |
| | | | mU*mU*mU*mU*mUmAmUmCmCmCmCmAmU | | | | |
| | | | mUmCmumAmCmAmGmCmAmGmUmAmCmU | | | | |
| | | | mGmAmGmCmAmAmUmGlClClAmUmAmGmU | | | | |
| | | | mCmAmGmC*mA*mA*mU*mC-3′ | | | | |
| 77 | | 50 | 5′- | | | | |
| | | | mU*mU*mU*mU*mUmAmUmCmCmCmCmAmU | | | | |
| | | | mUmCmUmAmCmAmGmCmAmGmUmAmCmU | | | | |
| | | | mGmAmGmCmAmAmUmGaCdCdAmUmAmGm | | | | |
| | | | UmCmAmGmC*mA*mA*mU*mC-3′ | | | | |
| 78 | | 50 | 5′- | | | | |
| | | | mU*mU*mU*mU*mUmAmUmmCmCmCCmmAmU | | | | |
| | | | mUmCmUmAmCmAmGmCmAmGmUmAmCmU | | | | |
| | | | mGmAmGmCmAmAmUmGdCaCdAmUmAmGm | | | | |
| | | | UmCmAmGmC*mA*mA*mU*mC-3′ | | | | |
| 79 | | 50 | 5′- | | | | |
| | | | mU*mU*mU*mU*mUmAmUmCmCmCmCmAmU | | | | |
| | | | mUmCmUmAmCmAmGmCmAmGmUmAmCmU | | | | |
| | | | mGmAmGmCmAmAmUmGdCdCaAmUmAmGm | | | | |
| | | | UmCmAmGmC*mA*mA*mU*mC-3′ | | | | |
| 80 | | 50 | 5′- | | | | |
| | | | mU*mU*mU*mU*mUmAmUmCmCmCmCmAmU | | | | |
| | | | mUmCmUmAmCmAmGmCmAmGmUmAmCmU | | | | |
| | | | mGmAmGmCmAmAmUmGaCaCaAmUmAmGm | | | | |
| | | | UmCmAmGmC*mA*mA*mU*mC-3′ | | | | |
| 81 | | 50 | 5′- | | | | |
| | | | mU*mU*mU*mU*mUmAmUmCmCmCmCmAmU | | | | |
| | | | mUmCmUmAmCmAmGmCmAmGmUmAmCmU | | | | |
| | | | mGmAmGmCmAmAmUmGamCdCdAmUmAmG | | | | |
| | | | mUmCmAmGmC*mA*mA*mU*mC-3′ | | | | |
| 82 | | 50 | 5′- | | | | |
| | | | mU*mU*mU*mU*mUmAmUmCmCmCmCmAmU | | | | |
| | | | mUmCmUmAmCmAmGmCmAmGmUmAmCmU | | | | |
| | | | mGmAmGmCmAmAmUmGdCamCdAmUmAmG | | | | |
| | | | mumCmAmGmC*mA*mA*mU*mC-3′ | | | | |
| 83 | | 50 | 5′- | | | | |
| | | | mU*mU*mU*mU*mUmAmUmCmCmCmCmAmU | | | | |
| | | | mUmCmUmAmCmAmGmCmAmGmUmAmCmU | | | | |
| | | | mGmAmGmCmAmAmUmGdCdCamAmUmAmG | | | | |
| | | | mUmCmAmGmC*mA*mA*mU*mC-3′ | | | | |
| 84 | | 50 | 5′- | | | | |
| | | | mU*mU*mU*mUm*UmAmUmCmCmCmCmAmU | | | | |
| | | | mUmCmUmAmCmAmGmCmAmGmUmAmCmU | | | | |
| | | | mGmAmGmCmAmAmUmGdCaCdAmUmAmGm | | | | |
| | | | UmCmAmGmC*mA*mA*mU*mC-3′ | | | | |
| 85 | | 50 | 5′- | | | | |
| | | | mU*mU*mU*mU*mUmAmUmCmCmCmCmAmU | | | | |
| | | | mUmCmUmAmCmAmGmCmAmGmUmAmCmU | | | | |
| | | | mGmAmGmCmAmAmUmGdCaSdAmUmAmGm | | | | |
| | | | UmCmAmGmC*mA*mA*mU*mC-3′ | | | | |
| 86 | | 50 | 5′- | | | | |
| | | | mU*mU*mU*mU*mUmAmUmCmCmCmCmAmU | | | | |
| | | | mUmCmUmAmCmAmGmCmAmGmUmAmCmU | | | | |
| | | | mGmAmGmCmAmAmUmGdCrSdAmUmAmGm | | | | |
| | | | UmCmAmGmC*mA*mA*mU*mC-3′ | | | | |
| 87 | | 50 | 5′- | | | | |
| | | | mU*mU*mU*mU*mUmAmUmCmCmCmCmAmU | | | | |
| | | | mUmCmUmAmCmAmGmCmAmGmUmAmCmU | | | | |
| | | | mGmAmGmCmAmAmUmGdCmSdAmUmAmGm | | | | |
| | | | UmCmAmGmC*mA*mA*mU*mC-3′ | | | | |
| 88 | | 50 | 5′- | | | | |
| | | | mU*mU*mU*mU*mUmAmUmCmCmCmCmAmU | | | | |
| | | | mUmCmUmAmCmAmGmCmAmGmUmAmCmU | | | | |
| | | | mGmAmGmCmAmAmUmGsgCdCdAmUmAmG | | | | |
| | | | mumCmAmGmC*mA*mA*mU*mC-3′ | | | | |
| 89 | | 50 | 5′- | | | | |
| | | | mU*mU*mU*mU*mUmAmUmCmCmCmCmAmU | | | | |
| | | | mUmCmUmAmCmAmGmCmAmGmUmAmCmU | | | | |
| | | | mGmAmGmCmAmAmUmGdCsgCdAmUmAmG | | | | |
| | | | mUmCmAmGmC*mA*mA*mU*mC-3′ | | | | |
| 90 | | 50 | 5′- | | | | |
| | | | mU*mU*mU*mU*mUmAmUmCmCmCmCmAmU | | | | |
| | | | mUmCmUmAmCmAmGmCmAmGmUmAmCmU | | | | |
| | | | mGmAmGmCmAmAmUmGsgCsgCdAmUmAmG | | | | |
| | | | mUmCmAmGmC*mA*mA*mU*mC-3′ | | | | |
| 91 | | 50 | 5′- | | | | |
| | | | mU*mU*mU*mU*mUmAmUmCmCmCmCmAmU | | | | |
| | | | mUmCmUmAmCmAmGmCmAmGmUmAmCmU | | | | |
| | | | mGmAmGmCmAmAmUmGrgCdCdAmUmAmG | | | | |
| | | | mUmCmAmGmC*mA*mA*mU*mC-3′ | | | | |
| 92 | | 50 | 5′- | | | | |
| | | | mU*mU*mU*mU*mUmAmUmCmCmCmCmAmU | | | | |
| | | | mUmCmUmAmCmAmGmCmAmGmUmAmCmU | | | | |
| | | | mGmAmGmCmAmAmUmGdCrgCdAmUmAmG | | | | |
| | | | mUmCmAmGmC*mA*mA*mU*mC-3′ | | | | |
| 93 | | 50 | 5′- | | | | |
| | | | mU*mU*mU*mU*mUmAmUmCmCmCmCmAmU | | | | |
| | | | mumCmUmAmCmAmGmCmAmGmUmAmCmU | | | | |
| | | | mGmAmGmCmAmAmUmGdCdCrgAmUmAmG | | | | |
| | | | mumCmAmGmC*mA*mA*mU*mC-3′ | | | | |
| 94 | | 50 | 5′- | | | | |
| | | | mU*mU*mU*mU*mUmAmUmCmCmCmCmAmU | | | | |
| | | | mUmCmUmAmCmAmGmCmAmGmUmAmCmU | | | | |
| | | | mGmAmGmCmAmAmUmGsCdCdAmUmAmGm | | | | |
| | | | UmCmAmGmC*mA*mA*mU*mC-3′ | | | | |
| 95 | | 50 | 5′- | | | | |
| | | | mU*mU*mU*mU*mUmAmUmCmCmCmCmAmU | | | | |
| | | | mUmCmUmAmCmAmGmCmAmGmUmAmCmU | | | | |
| | | | mGmAmGmCmAmAmUmGdCsCdAmUmAmGm | | | | |
| | | | UmCmAmGmC*mA*mA*mU*mC-3′ | | | | |
| 96 | | 50 | 5′- | | | | |
| | | | mU*mU*mU*mU*mUmAmUmCmCmCmCmAmU | | | | |
| | | | mUmCmUmAmCmAmGmCmAmGmUmAmCmU | | | | |
| | | | mGmAmGmCmAmAmUmGdCdAsAmUmAmGm | | | | |
| | | | UmCmAmGmC*mA*mA*mU*mC-3′ | | | | |
| 97 | | 50 | 5′- | | | | |
| | | | mU*mU*mU*mU*mUmAmUmCmCmCmCmAmU | | | | |
| | | | mUmCmUmAmCmAmGmCmAmGmUmAmCmU | | | | |
| | | | mGmAmGmCmAmAmUmGfxCdCdAmUmAmGm | | | | |
| | | | UmCmAmGmC*mA*mA*mU*mC-3′ | | | | |
| 98 | | 50 | 5′- | | | | |
| | | | mU*mU*mU*mU″mUmAmUmCmCmCmCmAmU | | | | |
| | | | mUmCmUmAmCmAmGmCmAmGmUmAmCmU | | | | |
| | | | mGmAmGmCmAmAmUmGdClxCdAmUmAmGm | | | | |
| | | | UmCmAmGmC*mA*mA*mU*mC-3′ | | | | |
| 99 | | 50 | 5′- | | | | |
| | | | mU*mU*mU*mU*mUmAmUmCmCmCmCmAmU | | | | |
| | | | mUmCmUmAmCmAmGmCmAmGmUmAmCmU | | | | |
| | | | mGmAmGmCmAmAmUmGdCdCfxAmUmAmGm | | | | |
| | | | UmCmAmGmC*mA*mA*mU*mC-3′ | | | | |
| 100 | | 50 | 5′- | | | | |
| | | | mU*mU*mU*mU*mUmAmUmCmCmCmCmAmU | | | | |
| | | | mUmCmUmAmCmAmGmCmAmGmUmAmCmU | | | | |
| | | | mGmAmGmCmAmAmUmGhCdCdAmUmAmGm | | | | |
| | | | UmCmAmGmC*mA*mA*mU*mC-3′ | | | | |
| 101 | | 50 | 5′- | | | | |
| | | | mU*mU*mU*mU*mUmAmUmCmCmCmCmAmU | | | | |
| | | | mUmCmUmAmCmAmGmCmAmGmUmAmCmU | | | | |
| | | | mGmAmGmCmAmAmUmGdChCdAmUmAmGm | | | | |
| | | | UmCmAmGmC*mA*mA*mU*mC-3′ | | | | |
| 102 | | 50 | 5′- | | | | |
| | | | mU*mU*mU*mU*mUmAmUmCmCmCmCmAmU | | | | |
| | | | mUmCmUmAmCmAmGmCmAmGmUmAmCmU | | | | |
| | | | mGmAmGmCmAmAmUmGdCdChAmUmAmGm | | | | |
| | | | UmCmAmGmC*mA*mA*mU*mC-3′ | | | | |
| 103 | | 50 | 5′- | | | | |
| | | | mU*mU*mU*mU*mUmAmUmCmCmCmCmAmU | | | | |
| | | | mUmCmUmAmCmAmGmCmAmGmUmAmCmU | | | | |
| | | | mGmAmGmCmAmAmUmGdldCdAmUmAmGmU | | | | |
| | | | mCmAmGmC*mA*mA*mU*mC-3′ | | | | |
| 104 | | 50 | 5′- | | | | |
| | | | mU*mU*mU*mU*mUmAmUmCmCmCmCmAmU | | | | |
| | | | mUmCmUmAmCmAmGmCmAmGmUmAmCmU | | | | |
| | | | mGmAmGmCmAmAmUmGdCdldAmUmAmGmU | | | | |
| | | | mCmAmGmC*mA*mA*mU*mC-3′ | | | | |
| 105 | | 50 | 5′- | | | | |
| | | | mU*mU*mU*mU*mUmAmUmCmCmCmCmAmU | | | | |
| | | | mUmCmUmAmCmAmGmCmAmGmUmAmCmU | | | | |
| | | | mGmAmGmCmAmAmUmGdCdCdlmUmAmGmU | | | | |
| | | | mCmAmGmC*mA*mA*mU*mC-3′ | | | | |
| 106 | | 50 | 5′- | | | | |
| | | | mU*mU*mU*mU*mUmAmUmCmCmCmCmAmU | | | | |
| | | | mUmCmUmAmCmAmGmCmAmGmUmAmCmU | | | | |
| | | | mGmAmGmCmAmAmUmGldldAmUmAmGmU | | | | |
| | | | mOmAmGmC*mA*mA*mU*mC-3′ | | | | |
| 107 | | 50 | 5′- | | | | |
| | | | mU*mU*mU*mU*mUmAmUmCmCmCmCmAmU | | | | |
| | | | mUmCmUmAmCmAmGmCmAmGmUmAmCmU | | | | |
| | | | mGmAmGmCmAmAmUmGdCdldlmUmAmGmU | | | | |
| | | | mOmAmGmC*mA*mA*mU*mC-3′ | | | | |
| 108 | | 50 | 5′- | | | | |
| | | | mU*mU*mU*mU*mUmAmUmCmCmCmCmAmU | | | | |
| | | | mUmCmUmAmCmAmGmCmAmGmUmAmCmU | | | | |
| | | | mGmAmGmCmAmAmUmGdldCdlmUmAmGmU | | | | |
| | | | mCmAmGmC*mA*mA*mU*mC-3′ | | | | |
| 109 | | 50 | 5′- | | | | |
| | | | mU*mU*mU*mU*mUmAmUmCmCmCmCmAmU | | | | |
| | | | mUmCmUmAmCmAmGmCmAmGmUmAmCmU | | | | |
| | | | mGmAmGmCmAmAmUmGdldldlmUmAmGmUm | | | | |
| | | | CmAmGmC*mA*mA*mU*mC-3 | | | | |
| | | | Human LRRK2 G2019S GluR-gRNA | | | | |
| | | | (45+6-3-9 Construct) | | | | |
| 110 | | 63 | 5′- | | | | |
| | | (45 + 18) | mG*mU*mG*mG*mAmAmUmAmGmUmAmUmA | | | | |
| | | | mAmCmAmAmUmAmUmGmCmUmAmAmAmUm | | | | |
| | | | GmUmUmGmUmUmAmUmAmGmUmAmUmCm | | | | |
| | | | CmOCmAmC- | | | | |
| | | | mGmCmAmAmUmGdCdCdGmUmAmGmUmC* | | | | |
| | | | mA*mG*mC*mA-3′ | | | | |
| 111 | | 63 | 5′- | | | | |
| | | (45 + 18) | mG*mU*mG*mG*mAmAmUmAmGmUmAmUmA | | | | |
| | | | mAmCmAmAmUmAmUmGmCmUmAmAmAmUm | | | | |
| | | | GmUmUmGmUmUmAmUmAmGmUmAmUmCm | | | | |
| | | | CmCmAmC- | | | | |
| | | | mGmCmAmAmUmGdCdCdAmUmAmGmUmC* | | | | |
| | | | mA*mG*mC*mA-3′ | | | | |
| 112 | | 63 | 5′ | | | | |
| | | (45 + 18) | mG*mU*mG*mG*mAmAmUmAmGmUmAmUmA | | | | |
| | | | mAmCmAmAmUmAmUmGmCmUmAmAmAmUm | | | | |
| | | | GmUmUmGmUmUmAmUmAmGmUmAmUmCm | | | | |
| | | | CmCmAmC- | | | | |
| | | | mGmCmAmAmUmGfCdCdAmUmAmGmUmC*m | | | | |
| | | | A*mG*mC*mA-3′ | | | | |
| 113 | | 63 | 5′- | | | | |
| | | (45 + 18) | mG*mU*mG*mG*mAmAmUmAmGmUmAmUmA | | | | |
| | | | mAmCmAmAmUmAmUmGmCmUmAmAmAmUm | | | | |
| | | | GmUmUmGmUmUmAmUmAmGmUmAmUmCm | | | | |
| | | | CmCmAmC- | | | | |
| | | | mGmCmAmAmUmGdClCdAmUmAmGmUmC*m | | | | |
| | | | A*mG*mC*mA-3′ | | | | |
| 114 | | 63 | 5′- | | | | |
| | | (45 + 18) | mG*mU*mG*mG*mAmAmUmAmGmUmAmUmA | | | | |
| | | | mAmCmAmAmUmAmUmGmCmUmAmAmAmUm | | | | |
| | | | GmUmUmGmUmUmAmUmAmGmUmAmUmCm | | | | |
| | | | CmCmAmC- | | | | |
| | | | mGmCmAmAmUmGdCdCfAmUmAmGmUmC*m | | | | |
| | | | A*mG*mC*mA-3′ | | | | |
| 115 | | 63 | 5′- | | | | |
| | | (45 + 18) | mG*mU*mG*mG*mAmAmUmAmGmUmAmUmA | | | | |
| | | | mAmCmAmAmUmAmUmGmCmUmAmAmAmUm | | | | |
| | | | GmUmUmGmUmUmAmUmAmGmUmAmUmCm | | | | |
| | | | CmCmAmC- | | | | |
| | | | mGmCmAmAmUmGdCtCtAmUmAmGmUmC*m | | | | |
| | | | A*mG*mC*mA-3′ | | | | |
| 116 | | 63 | 5′- | | | | |
| | | (45 + 18) | mG*mU*mG*mG*mAmAmUmAmGmUmAmUmA | | | | |
| | | | mAmCmAmAmUmAmUmGmCmUmAmAmAmUm | | | | |
| | | | GmUmUmGmUmUmAmUmAmGmUmAmUmCm | | | | |
| | | | CmCmAmC- | | | | |
| | | | mGmCmAmAmUmGtCtCdAmUmAmGmUmC*m | | | | |
| | | | A*mG*mC*mA-3′ | | | | |
| 117 | | 63 | 5′- | | | | |
| | | (45 + 18) | mG*mU*mG*mG*mAmAmUmAmGmUmAmUmA | | | | |
| | | | mAmCmAmAmUmAmUmGmCmUmAmAmAmUm | | | | |
| | | | GmUmUmGmUmUmAmUmAmGmUmAmUmCm | | | | |
| | | | CmCmAmC- | | | | |
| | | | mGmCmAmAmUmGtCtCtAmUmAmGmUmC*mA | | | | |
| | | | *mG*mC*mA-3′ | | | | |
| 118 | | 63 | 5′- | | | | |
| | | (45 + 18) | mG*mU*mG*mG*mAmAmUmAmGmUmAmUmA | | | | |
| | | | mAmCmAmAmUmAmUmGmCmUmAmAmAmUm | | | | |
| | | | GmUmUmGmUmUmAmUmAmGmUmAmUmCm | | | | |
| | | | CmCmAmC- | | | | |
| | | | mGmCmAmAmUmGaCdCdAmUmAmGmUmC*m | | | | |
| | | | A*mG*mC*mA-3′ | | | | |
| 119 | | 63 | 5′ | | | | |
| | | (45 + 18) | mG*mU*mG*mG*mAmAmUmAmGmUmAmUmA | | | | |
| | | | mAmCmAmAmUmAmUmGmCmUmAmAmAmUm | | | | |
| | | | GmUmUmGmUmUmAmUmGmUmAmUmCm | | | | |
| | | | CmCmAmC- | | | | |
| | | | mGmCmAmAmUmGdCaCdAmUmAmGmUmC*m | | | | |
| | | | A*mG*mC*mA-3′ | | | | |
| 120 | | 63 | 5′- | | | | |
| | | (45 + 18) | mG*mU*mG*mG*mAmAmUmAmGmUmAmUmA | | | | |
| | | | mAmCmAmAmUmAmUmGmCmUmAmAmAmUm | | | | |
| | | | GmUmUmGmUmUmAmUmAmGmUmAmUmCm | | | | |
| | | | CmCmAmC- | | | | |
| | | | mGmCmAmAmUmGdCdCaAmUmAmGmUmC*m | | | | |
| | | | A*mG*mC*mA-3′ | | | | |
| 121 | | 63 | 5′- | | | | |
| | | (45 + 18) | mG*mU*mG*mG*mAmAmUmAmGmUmAmUmA | | | | |
| | | | mAmCmAmAmUmAmUmGmCmUmAmAmAmUm | | | | |
| | | | GmUmUmGmUmUmAmUmAmGmUmAmUmCm | | | | |
| | | | CmCmAmC- | | | | |
| | | | mGmCmAmAmUmGaCaCaAmUmAmGmUmC*m | | | | |
| | | | A*mG*mC*mA-3′ | | | | |
| 122 | | 63 | 5′- | | | | |
| | | (45 + 18) | mG*mU*mG*mG*mAmAmUmAmGmUmAmUmA | | | | |
| | | | mAmCmAmAmUmAmUmGmCmUmAmAmAmUm | | | | |
| | | | GmUmUmGmUmUmAmUmAmGmUmAmUmCm | | | | |
| | | | CmCmAmC- | | | | |
| | | | mGmCmAmAmUmGamCdCdAmUmAmGmUmC | | | | |
| | | | *mA*mG*mC*mA-3′ | | | | |
| 123 | | 63 | 5′- | | | | |
| | | (45 + 18) | mG*mU*mG*mG*mAmAmUmAmGmUmAmUmA | | | | |
| | | | mAmCmAmAmUmAmUmGmCmUmAmAmAmUm | | | | |
| | | | GmUmUmGmUmUmAmUmAmGmUmAmUmCm | | | | |
| | | | CmCmAmC- | | | | |
| | | | mGmCmAmAmUmGdCamCdAmUmAmGmUmC | | | | |
| | | | *mA*mG*mC*mA-3′ | | | | |
| 124 | | 63 | 5′- | | | | |
| | | (45 + 18) | mG*mU*mG*mG*mAmAmUmAmGmUmAmUmA | | | | |
| | | | mAmCmAmAmUmAmUmGmCmUmAmAmAmUm | | | | |
| | | | GmUmUmGmUmUmAmUmAmGmUmAmUmCm | | | | |
| | | | CmCmAmC- | | | | |
| | | | mGmCmAmAmUmGdCdCamAmUmAmGmUmC | | | | |
| | | | *mA*mG*mC*mA-3′ | | | | |
| 125 | | 63 | 5′- | | | | |
| | | (45 + 18) | mG*mU*mG*mG*mAmAmUmAmGmUmAmUmA | | | | |
| | | | mAmCmAmAmUmAmUmGmCmUmAmAmAmUm | | | | |
| | | | GmUmUmGmUmUmAmUmAmGmUmAmUmCm | | | | |
| | | | CmCmAmC- | | | | |
| | | | mGmCmAmAmUmGdCaCdAmUmAmGmUmC* | | | | |
| | | | mA*mG*mC*mA-3′ | | | | |
| 126 | | 63 | 5′- | | | | |
| | | (45 + 18) | mG*mU*mG*mG*mAmAmUmAmGmUmAmUmA | | | | |
| | | | mAmCmAmAmUmAmUmGmCmUmAmAmAmUm | | | | |
| | | | GmUmUmGmUmUmAmUmAmGmUmAmUmCm | | | | |
| | | | CmCmAmC- | | | | |
| | | | mGmCmAmAmUmGdCdSdAmUmAmGmUmC*m | | | | |
| | | | A*mG*mC*mA-3′ | | | | |
| 127 | | 63 | 5′ | | | | |
| | | (45 + 18) | mG*mU*mG*mG*mAmAmUmAmGmUmAmUmA | | | | |
| | | | mAmCmAmAmUmAmUmGmCmUmAmAmAmUm | | | | |
| | | | GmUmUmGmUmUmAmUmAmGmUmAmUmCm | | | | |
| | | | CmCmAmC- | | | | |
| | | | mGmCmAmAmUmGdCrSdAmUmAmGmUmC*m | | | | |
| | | | A*mG*mC*mA-3′ | | | | |
| 128 | | 63 | 5′- | | | | |
| | | (45 + 18) | mG*mU*mG*mG*mAmAmUmAmGmUmAmUmA | | | | |
| | | | mAmCmAmAmUmAmUmGmCmUmAmAmAmUm | | | | |
| | | | GmUmUmGmUmUmAmUmAmGmUmAmUmCm | | | | |
| | | | CmCmAmC- | | | | |
| | | | mGmCmAmAmUmGdCmSdAmUmAmGmUmC* | | | | |
| | | | mA*mG*mC*mA-3′ | | | | |
| 129 | | 63 | 5′- | | | | |
| | | (45 + 18) | mG*mU*mG*mG*mAmAmUmAmGmUmAmUmA | | | | |
| | | | mAmCmAmAmUmAmUmGmCmUmAmAmAmUm | | | | |
| | | | GmUmUmGmUmUmAmUmAmGmUmAmUmCm | | | | |
| | | | CmCmAmC- | | | | |
| | | | mGmCmAmAmUmGsgCdCdAmUmAmGmUmC* | | | | |
| | | | mA*mG*mC*mA-3′ | | | | |
| 130 | | 63 | 5′- | | | | |
| | | (45 + 18) | mG*mU*mG*mG*mAmAmUmAmGmUmAmUmA | | | | |
| | | | mAmCmAmAmUmAmUmGmCmUmAmAmAmUm | | | | |
| | | | GmUmUmGmUmUmAmUmAmGmUmAmUmCm | | | | |
| | | | CmCmAmC- | | | | |
| | | | mGmCmAmAmUmGdCsgCdAmUmAmGmUmC* | | | | |
| | | | mA*mG*mC*mA-3′ | | | | |
| 131 | | 63 | 5′- | | | | |
| | | (45 + 18) | mG*mU*mG*mG*mAmAmUmAmGmUmAmUmA | | | | |
| | | | mAmCmAmAmUmAmUmGmCmUmAmAmAmUm | | | | |
| | | | GmUmUmGmUmUmAmUmAmGmUmAmUmCm | | | | |
| | | | CmCmAmC- | | | | |
| | | | mGmCmAmAmUmGsgCsgCdAmUmAmGmUmC | | | | |
| | | | *mA*mG*mC*mA-3′ | | | | |
| 132 | | 63 | 5′- | | | | |
| | | (45 + 18) | mG*mU*mG*mG*mAmAmUmAmGmUmAmUmA | | | | |
| | | | GmUmUmGmUmUmAmUmAmGmUmAmUmCm | | | | |
| | | | CmCmAmC- | | | | |
| | | | mGmCmAmAmUmGrgCdCdAmUmAmGmUmC*** | | | | |
| | | | mA*mG*mC*mA-3′ | | | | |
| 133 | | 63 | 5′- | | | | |
| | | (45 + 18) | mG*mU*mG*mG*mAmAmUmAmGmUmAmUmA | | | | |
| | | | mAmCmAmAmUmAmUmGmCmUmAmAmAmUm | | | | |
| | | | GmUmUmGmUmUmAmUmAmGmUmAmUmCm | | | | |
| | | | CmCmAmC- | | | | |
| | | | mGmCmAmAmUmGdCrgCdAmUmAmGmUmC* | | | | |
| | | | mA*mG*mC*mA-3′ | | | | |
| 134 | | 63 | 5′- | | | | |
| | | (45 + 18) | mG*mU*mG*mG*mAmAmUmAmGmUmAmUmA | | | | |
| | | | mAmCmAmAmUmAmUmGmCmUmAmAmAmUm | | | | |
| | | | GmUmUmGmUmUmAmUmAmGmUmAmUmCm | | | | |
| | | | CmCmAmC- | | | | |
| | | | mGmCmAmAmUmGdCdCrgAmUmAmGmUmC* | | | | |
| | | | mA*mG*mC*mA-3′ | | | | |
| 135 | | 63 | 5′- | | | | |
| | | (45 + 18) | mG*mU*mG*mG*mAmAmUmAmGmUmAmUmA | | | | |
| | | | mAmCmAmAmUmAmUmGmCmUmAmAmAmUm | | | | |
| | | | GmUmUmGmUmUmAmUmAmGmUmAmUmCm | | | | |
| | | | CmCmAmC- | | | | |
| | | | mGmCmAmAmUmGsCdCdAmUmAmGmUmC*m | | | | |
| | | | A*mG*mC*mA-3′ | | | | |
| 136 | | 63 | 5′- | | | | |
| | | (45 + 18) | mG*mU*mG*mG*mAmAmUmAmGmUmAmUmA | | | | |
| | | | mAmCmAmAmUmAmUmGmCmUmAmAmAmUm | | | | |
| | | | GmUmUmGmUmUmAmUmAmGmUmAmUmCm | | | | |
| | | | CmCmAmC- | | | | |
| | | | mGmCmAmAmUmGBsCdAmUmAmGmUmC*m | | | | |
| | | | A*mG*mC*mA-3′ | | | | |
| 137 | | 63 | 5′- | | | | |
| | | (45 + 18) | mG*mU*mG*mG*mAmAmUmAmGmUmAmUmA | | | | |
| | | | mAmCmAmAmUmAmUmGmCmUmAmAmAmUm | | | | |
| | | | GmUmUmGmUmUmAmUmAmGmUmAmUmCm | | | | |
| | | | CmCmAmC- | | | | |
| | | | mGmCmAmAmUmGdCdCsAmUmAmGmUmC*m | | | | |
| | | | Am*G*mC*mA-3′ | | | | |
| 138 | | 63 | 5′- | | | | |
| | | (45 + 18) | mG*mU*mG*mG*mAmAmUmAmGmUmAmUmA | | | | |
| | | | mAmCmAmAmUmAmUmGmCmUmAmAmAmUm | | | | |
| | | | GmUmUmGmUmUmAmUmAmGmUmAmUmCm | | | | |
| | | | CmCmAmC- | | | | |
| | | | mGmCmAmAmUmGtxCdCdAmUmAmGmUmC* | | | | |
| | | | mA*mG*mC*mA-3′ | | | | |

| | | |
|---|---|---|
| 139 | 63 | 5′- |
| | (45 + 18) | mG*mU*mG*mG*mAmAmUmAmGmUmAmUmA |
| | | mAmCmAmAmUmAmUmGmCmUmAmAmAmUm |
| | | GmUmUmGmUmUmAmUmAmGmUmAmUmCm |
| | | CmCmAmC- |
| | | mGmCmAmAmUmGdCfxCdAmUmAmGmUmC* |
| | | mA*mG*mC*mA-3′ |
| 140 | 63 | 5′- |
| | (45 + 18) | mG*mU*mG*mG*mAmAmUmAmGmUmAmUmA |
| | | mAmCmAmAmUmAmUmGmCmUmAmAmAmUm |
| | | GmUmUmGmUmUmAmUmAmGmUmAmUmCm |
| | | CmCmAmC- |
| | | mGmCmAmAmUmGdCdCtxAmUmAmGmUmC* |
| | | mA*mG*mC*mA-3′ |
| 141 | (45 + 18) | 5′- |
| | | mG*mU*mG*mG*mAmAmUmAmGmUmAmUmA |
| | | mAmCmAmAmUmAmUmGmCmUmAmAmAmUm |
| | | GmUmUmGmUmUmAmUmAmGmUmAmUmCm |
| | | CmCmAmC- |
| | | mGmCmAmAmUmGhCdCdAmUmAmGmUmC* |
| | | mA*mG*mC*mA-3′ |
| 142 | 63 | 5′- |
| | (45 + 18) | mG*mU*mG*mG*mAmAmUmAmGmUmAmUmA |
| | | mAmCmAmAmUmAmUmGmCmimAmAmAmUm |
| | | GmUmUmGmUmUmAmUmAmGmUmAmUmCm |
| | | CmCmAmC- |
| | | mGmCmAmAmUmGdChCdAmUmAmGmUmC* |
| | | mA*mG*mC*mA-3′ |
| 143 | 63 | 5′- |
| | (45 + 18) | mG*mU*mG*mG*mAmAmUmAmGmUmAmUmA |
| | | mAmCmAmAmUmAmUmGmCmUmAmAmAmUm |
| | | GmUmUmGmUmUmAmUmAmGmUmAmUmCm |
| | | CmCmAmG- |
| | | mGmCmAmAmUmGdCdChAmUmAmGmUmC* |
| | | mA*mG*mC*mA-3′ |
| 144 | 63 | 5′- |
| | (45 + 18) | mG*mU*mG*mG*mAmAmUmAmGmUmAmUmA |
| | | mAmCmAmAmUmAmUmGmCmUmAmAmAmUm |
| | | GmUmUmGmUmUmAmUmAmGmUmAmUmCm |
| | | CmCmAmC- |
| | | mGmCmAmAmUmGdldCdAmUmAmGmUmC*m |
| | | A*mG*mC*mA-3′ |
| 145 | 63 | 5′- |
| | (45 + 18) | mG*mU*mG*mG*mAmAmUmAmGmUmAmUmA |
| | | mAmCmAmAmUmAmUmGmCmUmAmAmAmUm |
| | | GmUmUmGmUmUmAmUmAmGmUmAmUmCm |
| | | CmCmAmC- |
| | | mGmCmAmAmUmGdCdldAmUmAmGmUmC*m |
| | | A*mG*mC*mA-3′ |
| 146 | 63 | 5′- |
| | (45 + 18) | mG*mU*mG*mG*mAmAmUmAmGmUmAmUmA |
| | | mAmCmAmAmUmAmUmGmCmUmAmAmAmUm |
| | | GmUmUmGmUmUmAmUmAmGmUmAmUmCm |
| | | CmCmAmC- |
| | | mGmCmAmAmUmGdCdCdlmUmAmGmUmC*m |
| | | A*mG*mC*mA-3′ |
| 147 | 63 | 5′- |
| | (45 + 18) | mG*mU*mG*mG*mAmAmUmAmGmUmAmUmA |
| | | mAmCmAmAmUmAmUmGmCmUmAmAmAmUm |
| | | GmUmUmGmUmUmAmUmAmGmUmAmUmCm |
| | | CmCmAmC- |
| | | mGmCmAmAmUmGdldldAmUmAmGmUmC*mA |
| | | *mG*mC*mA-3′ |
| 148 | 63 | 5′- |
| | (45 + 18) | mG*mUmG*mG*mAmAmUmAmGmUmAmUmA |
| | | mAmCmAmAmUmAmUmGmCmUmAmAmAmUm |
| | | GmUmUmGmUmUmAmUmAmGmUmAmUmCm |
| | | CmCmAmC- |
| | | mGmCmAmAmUmGdCdldlmUmAmGmUmC*mA |
| | | *mG*mC*mA-3′ |
| 149 | 63 | 5′- |
| | (45 + 18) | mG*mU*mG*mG*mAmAmUmAmGmUmAmUmA |
| | | mAmCmAmAmUmAmUmGmCmUmAmAmAmUm |
| | | GmUmUmGmUmUmAmUmAmGmUmAmUmCm |
| | | CmCmAmC- |
| | | mGmCmAmAmUmGdldCdlmUmAmGmUmC*mA |
| | | *mG*mC*mA-3′ |
| 150 | 63 | 5′- |
| | (45 + 18) | mG*mU*mG*mG*mAmAmUmAmGmUmAmUmA |
| | | mAmCmAmAmUmAmUmGmCmUmAmAmAmUm |
| | | GmUmUmGmUmUmAmUmAmGmUmAmUmCm |
| | | CmCmAmC- |
| | | mGmCmAmAmUmGdldldmUmAmGmUmC*mA* |
| | | mG*mC*mA-3′ |

[0462] Editing mediated by ADAR2 was observed to be almost always higher than editing mediated by ADAR1p110. Furthermore, mismatches outside of the triplet were generally well tolerated and allowed to improve the editing activity. Relative to the editing observed for a guide oligonucleotide that is fully 2′-OMe modified with a DNA triplet, generally editing was observed to be higher for guide oligonucleotides comprising a FANA triplet, and for guide oligonucleotides comprising an unmodified or fully 2′-OMe modified dsRBD motif (the portion of the guide oligonucleotide that binds to the double-stranded RNA binding domain (dsRBD) of ADAR2 or ADAR1p110).

### Other Embodiments

[0463] All publications, patents, and patent applications mentioned in this specification are incorporated herein by reference in their entirety to the same extent as if each individual publication, patent, or patent application was specifically and individually indicated to be incorporated by reference in its entirety. Where a term in the present application is found to be defined differently in a document incorporated herein by reference, the definition provided herein is to serve as the definition for the term.

[0464] While the invention has been described in connection with specific embodiments thereof, it will be understood that invention is capable of further modifications and this application is intended to cover any variations, uses, or adaptations of the invention following, in general, the principles of the invention and including such departures from the present disclosure that come within known or customary practice within the art to which the invention pertains and may be applied to the essential features hereinbefore set forth, and follows in the scope of the claims.

### EQUIVALENTS

[0465] Those skilled in the art will recognize, or be able to ascertain using no more than routine experimentation, many equivalents to the specific embodiments and methods described herein. Such equivalents are intended to be encompassed by the scope of the following claims.

The application's sequence listing, which the Patent Office published only in electronic form, follows.

SEQUENCE LISTING (150 sequences)

SEQ ID NO: 1 - RNA, 20 nt, synthetic construct
  source 1..20: mol_type = other RNA; note = Description of Artificial Sequence: Synthetic oligonucleotide
ggtgaatagtataacaatat

SEQ ID NO: 2 - RNA, 20 nt, synthetic construct
  source 1..20: mol_type = other RNA; note = Description of Artificial Sequence: Synthetic oligonucleotide
atgttgttatagtatccacc

SEQ ID NO: 3 - RNA, 45 nt, synthetic construct
  source 1..45: mol_type = other RNA; note = Description of Artificial Sequence: Synthetic oligonucleotide
ggtgaatagtataacaatatgctaaatgttgttatagtatccacc

SEQ ID NO: 4 - RNA, 20 nt, synthetic construct
  source 1..20: mol_type = other RNA; note = Description of Artificial Sequence: Synthetic oligonucleotide
ggtgaagaggagaacaatat

SEQ ID NO: 5 - RNA, 20 nt, synthetic construct
  source 1..20: mol_type = other RNA; note = Description of Artificial Sequence: Synthetic oligonucleotide
atgttgttctcgtctccacc

SEQ ID NO: 6 - RNA, 45 nt, synthetic construct
  source 1..45: mol_type = other RNA; note = Description of Artificial Sequence: Synthetic oligonucleotide
ggtgaagaggagaacaatatgctaaatgttgttctcgtctccacc

SEQ ID NO: 7 - RNA, 25 nt, synthetic construct
  source 1..25: mol_type = other RNA; note = Description of Artificial Sequence: Synthetic oligonucleotide
ggtgtcgagaagaggagaacaatat

SEQ ID NO: 8 - RNA, 25 nt, synthetic construct
  source 1..25: mol_type = other RNA; note = Description of Artificial Sequence: Synthetic oligonucleotide
atgttgttctcgtctcctcgacacc

SEQ ID NO: 9 - RNA, 55 nt, synthetic construct
  source 1..55: mol_type = other RNA; note = Description of Artificial Sequence: Synthetic oligonucleotide
ggtgtcgagaagaggagaacaatatgctaaatgttgttctcgtctcctcgacacc

SEQ ID NO: 10 - RNA, 22 nt, synthetic construct
  source 1..22: mol_type = other RNA; note = Description of Artificial Sequence: Synthetic oligonucleotide
gggtggaatagtataacaatat

SEQ ID NO: 11 - RNA, 22 nt, synthetic construct
  source 1..22: mol_type = other RNA; note = Description of Artificial Sequence: Synthetic oligonucleotide
atgttgttatagtatcccacct

SEQ ID NO: 12 - RNA, 49 nt, synthetic construct
  source 1..49: mol_type = other RNA; note = Description of Artificial Sequence: Synthetic oligonucleotide
gggtggaatagtataacaatatgctaaatgttgttatagtatcccacct

SEQ ID NO: 13 - RNA, 20 nt, synthetic construct
  source 1..20: mol_type = other RNA; note = Description of Artificial Sequence: Synthetic oligonucleotide
gtggaatagtataacaatat

SEQ ID NO: 14 - RNA, 20 nt, synthetic construct
  source 1..20: mol_type = other RNA; note = Description of Artificial Sequence: Synthetic oligonucleotide
atgttgttatagtatcccac

SEQ ID NO: 15 - RNA, 45 nt, synthetic construct
  source 1..45: mol_type = other RNA; note = Description of Artificial Sequence: Synthetic oligonucleotide
gtggaatagtataacaatatgctaaatgttgttatagtatcccac

SEQ ID NO: 16 - RNA, 25 nt, synthetic construct
  source 1..25: mol_type = other RNA; note = Description of Artificial Sequence: Synthetic oligonucleotide
ggtgtcgagaatagtataacaatat

SEQ ID NO: 17 - RNA, 25 nt, synthetic construct
  source 1..25: mol_type = other RNA; note = Description of Artificial Sequence: Synthetic oligonucleotide
atgttgttatagtatcctcgacacc

SEQ ID NO: 18 - RNA, 55 nt, synthetic construct
  source 1..55: mol_type = other RNA; note = Description of Artificial Sequence: Synthetic oligonucleotide
ggtgtcgagaatagtataacaatatgctaaatgttgttatagtatcctcgacacc

SEQ ID NO: 19 - RNA, 22 nt, synthetic construct
  source 1..22: mol_type = other RNA; note = Description of Artificial Sequence: Synthetic oligonucleotide
gggtggaatagtataacaatat

SEQ ID NO: 20 - RNA, 22 nt, synthetic construct
  source 1..22: mol_type = other RNA; note = Description of Artificial Sequence: Synthetic oligonucleotide
atgttgttatagtatcccacct

SEQ ID NO: 21 - RNA, 49 nt, synthetic construct; identical to SEQ ID NO: 12
  source 1..49: mol_type = other RNA; note = Description of Artificial Sequence: Synthetic oligonucleotide

SEQ ID NO: 22 - RNA, 18 nt, synthetic construct
  source 1..18: mol_type = other RNA; note = Description of Artificial Sequence: Synthetic oligonucleotide
gggtggaatagtatacca

SEQ ID NO: 23 - RNA, 18 nt, synthetic construct
  source 1..18: mol_type = other RNA; note = Description of Artificial Sequence: Synthetic oligonucleotide
tggtatagtatcccacct

SEQ ID NO: 24 - RNA, 40 nt, synthetic construct
  source 1..40: mol_type = other RNA; note = Description of Artificial Sequence: Synthetic oligonucleotide
gggtggaatagtataccattcgtggtatagtatcccacct

SEQ ID NO: 25 - RNA, 20 nt, synthetic construct
  source 1..20: mol_type = other RNA; note = Description of Artificial Sequence: Synthetic oligonucleotide
gtgggtggaatagtatacca

SEQ ID NO: 26 - RNA, 20 nt, synthetic construct
  source 1..20: mol_type = other RNA; note = Description of Artificial Sequence: Synthetic oligonucleotide
tggtatagtatcccacctac

SEQ ID NO: 27 - RNA, 44 nt, synthetic construct
  source 1..44: mol_type = other RNA; note = Description of Artificial Sequence: Synthetic oligonucleotide
gtgggtggaatagtataccattcgtggtatagtatcccacctac

SEQ ID NO: 28 - RNA, 19 nt, synthetic construct
  source 1..19: mol_type = other RNA; note = Description of Artificial Sequence: Synthetic oligonucleotide
tgggtggaatagtatacca

SEQ ID NO: 29 - RNA, 19 nt, synthetic construct
  source 1..19: mol_type = other RNA; note = Description of Artificial Sequence: Synthetic oligonucleotide
tggtatagtatcccaccta

SEQ ID NO: 30 - RNA, 42 nt, synthetic construct
  source 1..42: mol_type = other RNA; note = Description of Artificial Sequence: Synthetic oligonucleotide
tgggtggaatagtataccattcgtggtatagtatcccaccta

SEQ ID NO: 31 - RNA, 17 nt, synthetic construct
  source 1..17: mol_type = other RNA; note = Description of Artificial Sequence: Synthetic oligonucleotide
ggtggaatagtatacca

SEQ ID NO: 32 - RNA, 17 nt, synthetic construct
  source 1..17: mol_type = other RNA; note = Description of Artificial Sequence: Synthetic oligonucleotide
tggtatagtatcccacc

SEQ ID NO: 33 - RNA, 38 nt, synthetic construct
  source 1..38: mol_type = other RNA; note = Description of Artificial Sequence: Synthetic oligonucleotide
ggtggaatagtataccattcgtggtatagtatcccacc

SEQ ID NO: 34 - RNA, 16 nt, synthetic construct
  source 1..16: mol_type = other RNA; note = Description of Artificial Sequence: Synthetic oligonucleotide
gtggaatagtatacca

SEQ ID NO: 35 - RNA, 16 nt, synthetic construct
  source 1..16: mol_type = other RNA; note = Description of Artificial Sequence: Synthetic oligonucleotide
tggtatagtatcccac

SEQ ID NO: 36 - RNA, 36 nt, synthetic construct
  source 1..36: mol_type = other RNA; note = Description of Artificial Sequence: Synthetic oligonucleotide
gtggaatagtataccattcgtggtatagtatcccac

SEQ ID NO: 37 - RNA, 45 nt, synthetic construct; identical to SEQ ID NO: 3
  source 1..45: mol_type = other RNA; note = Description of Artificial Sequence: Synthetic oligonucleotide

SEQ ID NO: 38 - RNA, 45 nt, synthetic construct; identical to SEQ ID NO: 6
  source 1..45: mol_type = other RNA; note = Description of Artificial Sequence: Synthetic oligonucleotide

SEQ ID NO: 39 - RNA, 55 nt, synthetic construct; identical to SEQ ID NO: 9
  source 1..55: mol_type = other RNA; note = Description of Artificial Sequence: Synthetic oligonucleotide

SEQ ID NO: 40 - RNA, 55 nt, synthetic construct
  source 1..55: mol_type = other RNA; note = Description of Artificial Sequence: Synthetic oligonucleotide
  misc_difference 1: note = modified_base - Any 2'-O-Methylnucleotide phosphorothioate
  misc_difference 2: note = modified_base - Any 2'-O-Methylnucleotide phosphorothioate
  misc_difference 3: note = modified_base - Any 2'-O-Methylnucleotide
  misc_difference 5: note = modified_base - Any 2'-O-Methylnucleotide
  misc_difference 6: note = modified_base - Any 2'-O-Methylnucleotide
  misc_difference 20: note = modified_base - Any 2'-O-Methylnucleotide
  misc_difference 23: note = modified_base - Any 2'-O-Methylnucleotide
  misc_difference 25: note = modified_base - Any 2'-O-Methylnucleotide
  misc_difference 27: note = modified_base - Any 2'-O-Methylnucleotide
  misc_difference 28: note = modified_base - Any 2'-O-Methylnucleotide
  misc_difference 32: note = modified_base - Any 2'-O-Methylnucleotide
  misc_difference 34: note = modified_base - Any 2'-O-Methylnucleotide
  misc_difference 35: note = modified_base - Any 2'-O-Methylnucleotide
  misc_difference 37: note = modified_base - Any 2'-O-Methylnucleotide
  misc_difference 38: note = modified_base - Any 2'-O-Methylnucleotide
  misc_difference 39: note = modified_base - Any 2'-O-Methylnucleotide
  misc_difference 40: note = modified_base - Any 2'-O-Methylnucleotide
  misc_difference 41: note = modified_base - Any 2'-O-Methylnucleotide
  misc_difference 43: note = modified_base - Any 2'-O-Methylnucleotide
  misc_difference 44: note = modified_base - Any 2'-O-Methylnucleotide
  misc_difference 45: note = modified_base - Any 2'-O-Methylnucleotide
  misc_difference 46: note = modified_base - Any 2'-O-Methylnucleotide
  misc_difference 47: note = modified_base - Any 2'-O-Methylnucleotide
  misc_difference 48: note = modified_base - Any 2'-O-Methylnucleotide
  misc_difference 49: note = modified_base - Any 2'-O-Methylnucleotide
  misc_difference 52: note = modified_base - Any 2'-O-Methylnucleotide
  misc_difference 54: note = modified_base - Any 2'-O-Methylnucleotide
  misc_difference 55: note = modified_base - Any 2'-O-Methylnucleotide
nnngnngagaagaggagaanaanangnnaaangnngnnnnngnnnnnnnganann

SEQ ID NO: 41 - RNA, 49 nt, synthetic construct; identical to SEQ ID NO: 12
  source 1..49: mol_type = other RNA; note = Description of Artificial Sequence: Synthetic oligonucleotide

SEQ ID NO: 42 - RNA, 45 nt, synthetic construct; identical to SEQ ID NO: 15
  source 1..45: mol_type = other RNA; note = Description of Artificial Sequence: Synthetic oligonucleotide

SEQ ID NO: 43 - RNA, 55 nt, synthetic construct; identical to SEQ ID NO: 18
  source 1..55: mol_type = other RNA; note = Description of Artificial Sequence: Synthetic oligonucleotide

SEQ ID NO: 44 - RNA, 49 nt, synthetic construct; identical to SEQ ID NO: 12
  source 1..49: mol_type = other RNA; note = Description of Artificial Sequence: Synthetic oligonucleotide

SEQ ID NO: 45 - RNA, 40 nt, synthetic construct; identical to SEQ ID NO: 24
  source 1..40: mol_type = other RNA; note = Description of Artificial Sequence: Synthetic oligonucleotide

SEQ ID NO: 46 - RNA, 44 nt, synthetic construct; identical to SEQ ID NO: 27
  source 1..44: mol_type = other RNA; note = Description of Artificial Sequence: Synthetic oligonucleotide

SEQ ID NO: 47 - RNA, 42 nt, synthetic construct; identical to SEQ ID NO: 30
  source 1..42: mol_type = other RNA; note = Description of Artificial Sequence: Synthetic oligonucleotide

SEQ ID NO: 48 - RNA, 38 nt, synthetic construct; identical to SEQ ID NO: 33
  source 1..38: mol_type = other RNA; note = Description of Artificial Sequence: Synthetic oligonucleotide

SEQ ID NO: 49 - RNA, 36 nt, synthetic construct; identical to SEQ ID NO: 36
  source 1..36: mol_type = other RNA; note = Description of Artificial Sequence: Synthetic oligonucleotide

SEQ ID NO: 50 - DNA, 19 bp, synthetic construct
  source 1..19: mol_type = other DNA; note = Description of Artificial Sequence: Synthetic oligonucleotide
acatgaggatcacccatgt

SEQ ID NO: 51 - protein, 16 aa, unidentified
  source 1..16: note = Description of Unknown: RFGF peptide
AAVALLPAVLLALLAP

SEQ ID NO: 52 - protein, 11 aa, unidentified
  source 1..11: note = Description of Unknown: RFGF analogue peptide
AALLPVLLAAP

SEQ ID NO: 53 - protein, 13 aa, Human immunodeficiency virus
GRKKRRQRRRPPQ

SEQ ID NO: 54 - protein, 16 aa, Drosophila sp.
RQIKIWFQNRRMKWKK

SEQ ID NO: 55 - DNA, 2136 bp, Homo sapiens
  source 1..2136: mol_type = unassigned DNA
atggaacaaaaacttatttctgaagaagatctggatatagaagatgaagaaaacatgagttccagcagcactgatgtgaaggaaaaccgcaatctggacaacgtgtcccccaaggatggcagcacacctgggcctggcgagggctctcagctctccaatgggggtggtggtggccccggcagaaagcggcccctggaggagggcagcaatggccactccaagtaccgcctgaagaaaaggaggaaaacaccagggcccgtcctccccaagaacgccctgatgcagctgaatgagatcaagcctggtttgcagtacacactcctgtcccagactgggcccgtgcacgcgcctttgtttgtcatgtctgtggaggtgaatggccaggtttttgagggctctggtcccacaaagaaaaaggcaaaactccatgctgctgagaaggccttgaggtctttcgttcagtttcctaatgcctctgaggcccacctggccatggggaggaccctgtctgtcaacacggacttcacatctgaccaggccgacttccctgacacgctcttcaatggttttgaaactcctgacaaggcggagcctcccttttacgtgggctccaatggggatgactccttcagttccagcggggacctcagcttgtctgcttccccggtgcctgccagcctagcccagcctcctctccctgtcttaccaccattcccacccccgagtgggaagaatcccgtgatgatcttgaacgaactgcgcccaggactcaagtatgacttcctctccgagagcggggagagccatgccaagagcttcgtcatgtctgtggtcgtggatggtcagttctttgaaggctcggggagaaacaagaagcttgccaaggcccgggctgcgcagtctgccctggccgccatttttaacttgcacttggatcagacgccatctcgccagcctattcccagtgagggtcttcagctgcatttaccgcaggttttagctgacgctgtctcacgcctggtcctgggtaagtttggtgacctgaccgacaacttctcctcccctcacgctcgcagaaaagtgctggctggagtcgtcatgacaacaggcacagatgttaaagatgccaaggtgataagtgtttctacaggaacaaaatgtattaatggtgaatacatgagtgatcgtggccttgcattaaatgactgccatgcagaaataatatctcggagatccttgctcagatttctttatacacaacttgagctttacttaaataacaaagatgatcaaaaaagatccatctttcagaaatcagagcgaggggggtttaggctgaaggagaatgtccagtttcatctgtacatcagcacctctccctgtggagatgccagaatcttctcaccacatgagccaatcctggaagaaccagcagatagacacccaaatcgtaaagcaagaggacagctacggaccaaaatagagtctggtgaggggacgattccagtgcgctccaatgcgagcatccaaacgtgggacggggtgctgcaaggggagcggctgctcaccatgtcctgcagtgacaagattgcacgctggaacgtggtgggcatccagggatccctgctcagcattttcgtggagcccatttacttctcgagcatcatcctgggcagcctttaccacggggaccacctttccagggccatgtaccagcggatctccaacatagaggacctgccacctctctacaccctcaacaagcctttgctcagtggcatcagcaatgcagaagcacggcagccagggaaggcccccaacttcagtgtcaactggacggtaggcgactccgctattgaggtcatcaacgccacgactgggaaggatgagctgggccgcgcgtcccgcctgtgtaagcacgcgttgtactgtcgctggatgcgtgtgcacggcaaggttccctcccacttactacgctccaagattaccaagcccaacgtgtaccatgagtccaagctggcggcaaaggagtaccaggccgccaaggcgcgtctgttcacagccttcatcaaggcggggctgggggcctgggtggagaagcccaccgagcaggaccagttctcactcacgccctga

SEQ ID NO: 56 - DNA, 3711 bp, Homo sapiens
  source 1..3711: mol_type = unassigned DNA
atggaacaaaaacttatttctgaagaagatctgaatccgcggcaggggtattccctcagcggatactacacccatccatttcaaggctatgagcacagacagctcaggtaccagcagcctgggccaggatcttcccccagtagtttcctgcttaagcaaatagaatttctcaaggggcagctcccagaagcaccggtgattggaaagcagacaccgtcactgccaccttccctcccaggactccggccaaggtttccagtactacttgcctccagtaccagaggcaggcaagtggacatcaggggtgtccccaggggcgtgcatctcagaagtcaggggctccagagagggttccagcatccttcaccacgtggcaggagtctgccacagagaggtgttgattgcctttcctcacatttccaggaactgagtatctaccaagatcaggaacaaaggatcttaaagttcctggaagagcttggggaagggaaggccaccacagcacatgatctgtctgggaaacttgggactccgaagaaagaaatcaatcgagttttatactccctggcaaagaagggcaagctacagaaagaggcaggaacaccccctttgtggaaaatcgcggtctccactcaggcttggaaccagcacagcggagtggtaagaccagacggtcatagccaaggagccccaaactcagacccgagtttggaaccggaagacagaaactccacatctgtctcagaagatcttcttgagccttttattgcagtctcagctcaggcttggaaccagcacagcggagtggtaagaccagacagtcatagccaaggatccccaaactcagacccaggtttggaacctgaagacagcaactccacatctgccttggaagatcctcttgagtttttagacatggccgagatcaaggagaaaatctgcgactatctcttcaatgtgtctgactcctctgccctgaatttggctaaaaatattggccttaccaaggcccgagatataaatgctgtgctaattgacatggaaaggcagggggatgtctatagacaagggacaacccctcccatatggcatttgacagacaagaagcgagagaggatgcaaatcaagagaaatacgaacagtgttcctgaaaccgctccagctgcaatccctgagaccaaaagaaacgcagagttcctcacctgtaatatacccacatcaaatgcctcaaataacatggtaaccacagaaaaagtggagaatgggcaggaacctgtcataaagttagaaaacaggcaagaggccagaccagaaccagcaagactgaaaccacctgttcattacaatggcccctcaaaagcagggtatgttgactttgaaaatggccagtgggccacagatgacatcccagatgacttgaatagtatccgcgcagcaccaggtgagtttcgagccatcatggagatgccctccttctacagtcatggcttgccacggtgttcaccctacaagaaactgacagagtgccagctgaagaaccccatcagcgggctgttagaatatgcccagttcgctagtcaaacctgtgagttcaacatgatagagcagagtggaccaccccatgaacctcgatttaaattccaggttgtcatcaatggccgagagtttcccccagctgaagctggaagcaagaaagtggccaagcaggatgcagctatgaaagccatgacaattctgctagaggaagccaaagccaaggacagtggaaaatcagaagaatcatcccactattccacagagaaagaatcagagaagactgcagagtcccagacccccaccccttcagccacatccttcttttctgggaagagccccgtcaccacactgcttgagtgtatgcacaaattggggaactcctgcgaattccgtctcctgtccaaagaaggccctgcccatgaacccaagttccaatactgtgttgcagtgggagcccaaactttccccagtgtgagtgctcccagcaagaaagtggcaaagcagatggccgcagaggaagccatgaaggccctgcatggggaggcgaccaactccatggcttctgataaccagcctgaaggtatgatctcagagtcacttgataacttggaatccatgatgcccaacaaggtcaggaagattggcgagctcgtgagatacctgaacaccaaccctgtgggtggccttttggagtacgcccgctcccatggctttgctgctgaattcaagttggtcgaccagtccggacctcctcacgagcccaagttcgtttaccaagcaaaagttgggggtcgctggttcccagccgtctgcgcacacagcaagaagcaaggcaagcaggaagcagcagatgcggctctccgtgtcttgattggggagaacgagaaggcagaacgcatgggtttcacagaggtaaccccagtgacaggggccagtctcagaagaactatgctcctcctctcaaggtccccagaagcacagccaaagacactccctctcactggcagcaccttccatgaccagatagccatgctgagccaccggtgcttcaacactctgactaacagcttccagccctccttgctcggccgcaagattctggccgccatcattatgaaaaaagactctgaggacatgggtgtcgtcgtcagcttgggaacagggaatcgctgtgtgaaaggagattctctcagcctaaaaggagaaactgtcaatgactgccatgcagaaataatctcccggagaggcttcatcaggtttctctacagtgagttaatgaaatacaactcccagactgcgaaggatagtatatttgaacctgctaagggaggagaaaagctccaaataaaaaagactgtgtcattccatctgtatatcagcactgctccgtgtggagatggcgccctctttgacaagtcctgcagcgaccgtgctatggaaagcacagaatcccgccactaccctgtcttcgagaatcccaaacaaggaaagctccgcaccaaggtggagaacggagaaggcacaatccctgtggaatccagtgacattgtgcctacgtgggatggcattcggctcggggagagactccgtaccatgtcctgtagtgacaaaatcctacgctggaacgtgctgggcctgcaaggggcactgttgacccacttcctgcagcccatttatctcaaatctgtcacattgggttaccttttcagccaagggcatctgacccgtgctatttgctgtcgtgtgacaagagatgggagtgcatttgaggatggactacgacatccctttattgtcaaccaccccaaggttggcagagtcagcatatatgattccaaaaggcaatccgggaagactaaggagacaagcgtcaactggtgtctggctgatggctatgacctggagatcctggacggtaccagaggcactgtggatgggccacggaatgaattgtcccgggtctccaaaaagaacatttttcttctatttaagaagctctgctccttccgttaccgcagggatctactgagactctcctatggtgaggccaagaaagctgcccgtgactacgagacggccaagaactacttcaaaaaaggcctgaaggatatgggctatgggaactggattagcaaaccccaggaggaaaagaacttttatctctgcccagtatag

SEQ ID NO: 57 - DNA, 9239 bp, Homo sapiens
  source 1..9239: mol_type = unassigned DNA
ggggcccgcggggagcgctggctgcgggcggtgagctgagctcgcccccggggagctgtggccggcgcccctgccggttccctgagcagcggacgttcatgctgggagggcggcgggttggaagcaggtgccaccatggctagtggcagctgtcaggggtgcgaagaggacgaggaaactctgaagaagttgatagtcaggctgaacaatgtccaggaaggaaaacagatagaaacgctggtccaaatcctggaggatctgctggtgttcacgtactccgagcgcgcctccaagttatttcaaggcaaaaatatccatgtgcctctgttgatcgtcttggactcctatatgagagtcgcgagtgtgcagcaggtgggttggtcacttctgtgcaaattaatagaagtctgtccaggtacaatgcaaagcttaatgggaccccaggatgttggaaatgattgggaagtccttggtgttcaccaattgattcttaaaatgctaacagttcataatgccagtgtaaacttgtcagtgattggactgaagaccttagatctcctcctaacttcaggtaaaatcaccttgctgatattggatgaagaaagtgatattttcatgttaatttttgatgccatgcactcatttccagccaatgatgaagtccagaaacttggatgcaaagctttacatgtgctgtttgagagagtctcagaggagcaactgactgaatttgttgagaacaaagattatatgatattgttaagtgcgttaacaaattttaaagatgaagaggaaattgtgcttcatgtgctgcattgtttacattccctagcgattccttgcaataatgtggaagtcctcatgagtggcaatgtcaggtgttataatattgtggtggaagctatgaaagcattccctatgagtgaaagaattcaagaagtgagttgctgtttgctccataggcttacattaggtaattttttcaatatcctggtattaaacgaagtccatgagtttgtggtgaaagctgtgcagcagtacccagagaatgcagcattgcagatctcagcgctcagctgtttggccctcctcactgagactattttcttaaatcaagatttagaggaaaagaatgagaatcaagagaatgatgatgagggggaagaagataaattgttttggctggaagcctgttacaaagcattaacgtggcatagaaagaacaagcacgtgcaggaggccgcatgctgggcactaaataatctccttatgtaccaaaacagtttacatgagaagattggagatgaagatggccatttcccagctcatagggaagtgatgctctccatgctgatgcattcttcatcaaaggaagttttccaggcatctgcgaatgcattgtcaactctcttagaacaaaatgttaatttcagaaaaatactgttatcaaaaggaatacacctgaatgttttggagttaatgcagaagcatatacattctcctgaagtggctgaaagtggctgtaaaatgctaaatcatctttttgaaggaagcaacacttccctggatataatggcagcagtggtccccaaaatactaacagttatgaaacgtcatgagacatcattaccagtgcagctggaggcgcttcgagctattttacattttatagtgcctggcatgccagaagaatccagggaggatacagaatttcatcataagctaaatatggttaaaaaacagtgtttcaagaatgatattcacaaactggtcctagcagctttgaacaggttcattggaaatcctgggattcagaaatgtggattaaaagtaatttcttctattgtacattttcctgatgcattagagatgttatccctggaaggtgctatggattcagtgcttcacacactgcagatgtatccagatgaccaagaaattcagtgtctgggtttaagtcttataggatacttgattacaaagaagaatgtgttcataggaactggacatctgctggcaaaaattctggtttccagcttataccgatttaaggatgttgctgaaatacagactaaaggatttcagacaatcttagcaatcctcaaattgtcagcatctttttctaagctgctggtgcatcattcatttgacttagtaatattccatcaaatgtcttccaatatcatggaacaaaaggatcaacagtttctaaacctctgttgcaagtgttttgcaaaagtagctatggatgattacttaaaaaatgtgatgctagagagagcgtgtgatcagaataacagcatcatggttgaatgcttgcttctattgggagcagatgccaatcaagcaaaggagggatcttctttaatttgtcaggtatgtgagaaagagagcagtcccaaattggtggaactcttactgaatagtggatctcgtgaacaagatgtacgaaaagcgttgacgataagcattgggaaaggtgacagccagatcatcagcttgctcttaaggaggctggccctggatgtggccaacaatagcatttgccttggaggattttgtataggaaaagttgaaccttcttggcttggtcctttatttccagataagacttctaatttaaggaaacaaacaaatatagcatctacactagcaagaatggtgatcagatatcagatgaaaagtgctgtggaagaaggaacagcctcaggcagcgatggaaatttttctgaagatgtgctgtctaaatttgatgaatggacctttattcctgactcttctatggacagtgtgtttgctcaaagtgatgacctggatagtgaaggaagtgaaggctcatttcttgtgaaaaagaaatctaattcaattagtgtaggagaattttaccgagatgccgtattacagcgttgctcaccaaatttgcaaagacattccaattccttggggcccatttttgatcatgaagatttactgaagcgaaaaagaaaaatattatcttcagatgattcactcaggtcatcaaaacttcaatcccatatgaggcattcagacagcatttcttctctggcttctgagagagaatatattacatcactagacctttcagcaaatgaactaagagatattgatgccctaagccagaaatgctgtataagtgttcatttggagcatcttgaaaagctggagcttcaccagaatgcactcacgagctttccacaacagctatgtgaaactctgaagagtttgacacatttggacttgcacagtaataaatttacatcatttccttcttatttgttgaaaatgagttgtattgctaatcttgatgtctctcgaaatgacattggaccctcagtggttttagatcctacagtgaaatgtccaactctgaaacagtttaacctgtcatataaccagctgtcttttgtacctgagaacctcactgatgtggtagagaaactggagcagctcattttagaaggaaataaaatatcagggatatgctcccccttgagactgaaggaactgaagattttaaaccttagtaagaaccacatttcatccctatcagagaactttcttgaggcttgtcctaaagtggagagtttcagtgccagaatgaattttcttgctgctatgcctttcttgcctccttctatgacaatcctaaaattatctcagaacaaattttcctgtattccagaagcaattttaaatcttccacacttgcggtctttagatatgagcagcaatgatattcagtacctaccaggtcccgcacactggaaatctttgaacttaagggaactcttatttagccataatcagatcagcatcttggacttgagtgaaaaagcatatttatggtctagagtagagaaactgcatctttctcacaataaactgaaagagattcctcctgagattggctgtcttgaaaatctgacatctctggatgtcagttacaacttggaactaagatcctttcccaatgaaatggggaaattaagcaaaatatgggatcttcctttggatgaactgcatcttaactttgattttaaacatataggatgtaaagccaaagacatcataaggtttcttcaacagcgattaaaaaaggctgtgccttataaccgaatgaaacttatgattgtgggaaatactgggagtggtaaaaccaccttattgcagcaattaatgaaaaccaagaaatcagatcttggaatgcaaagtgccacagttggcatagatgtgaaagactggcctatccaaataagagacaaaagaaagagagatctcgtcctaaatgtgtgggattttgcaggtcgtgaggaattctatagtactcatccccattttatgacgcagcgagcattgtaccttgctgtctatgacctcagcaagggacaggctgaagttgatgccatgaagccttggctcttcaatataaaggctcgcgcttcttcttcccctgtgattctcgttggcacacatttggatgtttctgatgagaagcaacgcaaagcctgcatgagtaaaatcaccaaggaactcctgaataagcgagggttccctgccatacgagattaccactttgtgaatgccaccgaggaatctgatgctttggcaaaacttcggaaaaccatcataaacgagagccttaatttcaagatccgagatcagcttgttgttggacagctgattccagactgctatgtagaacttgaaaaaatcattttatcggagcgtaaaaatgtgccaattgaatttcccgtaattgaccggaaacgattattacaactagtgagagaaaatcagctgcagttagatgaaaatgagcttcctcacgcagttcactttctaaatgaatcaggagtccttcttcattttcaagacccagcactgcagttaagtgacttgtactttgtggaacccaagtggctttgtaaaatcatggcacagattttgacagtgaaagtggaaggttgtccaaaacaccctaagggcattatttcgcgtagagatgtggaaaaatttctttcaaaaaaaaggaaatttccaaagaactacatgtcacagtattttaagctcctagaaaaattccagattgctttgccaataggagaagaatatttgctggttccaagcagtttgtctgaccacaggcctgtgatagagcttccccattgtgagaactctgaaattatcatccgactatatgaaatgccttattttccaatgggattttggtcaagattaatcaatcgattacttgagatttcaccttacatgctttcagggagagaacgagcacttcgcccaaacagaatgtattggcgacaaggcatttacttaaattggtctcctgaagcttattgtctggtaggatctgaagtcttagacaatcatccagagagtttcttaaaaattacagttccttcttgtagaaaaggctgtattcttttgggccaagttgtggaccacattgattctctcatggaagaatggtttcctgggttgctggagattgatatttgtggtgaaggagaaactctgttgaagaaatgggcattatatagttttaatgatggtgaagaacatcaaaaaatcttacttgatgacttgatgaagaaagcagaggaaggagatctcttagtaaatccagatcaaccaaggctcaccattccaatatctcagattgcccctgacttgattttggctgacctgcctagaaatattatgttgaataatgatgagttggaatttgaacaagctccagagtttctcctaggtgatggcagttttggatcagtttaccgagcagcctatgaaggagaagaagtggctgtgaagatttttaataaacatacatcactcaggctgttaagacaagagcttgtggtgctttgccacctccaccaccccagtttgatatctttgctggcagctgggattcgtccccggatgttggtgatggagttagcctccaagggttccttggatcgcctgcttcagcaggacaaagccagcctcactagaaccctacagcacaggattgcactccacgtagctgatggtttgagatacctccactcagccatgattatataccgagacctgaaaccccacaatgtgctgcttttcacactgtatcccaatgctgccatcattgcaaagattgctgactacggcattgctcagtactgctgtagaatggggataaaaacatcagagggcacaccagggtttcgtgcacctgaagttgccagaggaaatgtcatttataaccaacaggctgatgtttattcatttggtttactactctatgacattttgacaactggaggtagaatagtagagggtttgaagtttccaaatgagtttgatgaattagaaatacaaggaaaattacctgatccagttaaagaatatggttgtgccccatggcctatggttgagaaattaattaaacagtgtttgaaagaaaatcctcaagaaaggcctacttctgcccaggtctttgacattttgaattcagctgaattagtctgtctgacgagacgcattttattacctaaaaacgtaattgttgaatgcatggttgctacacatcacaacagcaggaatgcaagcatttggctgggctgtgggcacaccgacagaggacagctctcatttcttgacttaaatactgaaggatacacttctgaggaagttgctgatagtagaatattgtgcttagccttggtgcatcttcctgttgaaaaggaaagctggattgtgtctgggacacagtctggtactctcctggtcatcaataccgaagatgggaaaaagagacataccctagaaaagatgactgattctgtcacttgtttgtattgcaattccttttccaagcaaagcaaacaaaaaaattttcttttggttggaaccgctgatggcaagttagcaatttttgaagataagactgttaagcttaaaggagctgctcctttgaagatactaaatataggaaatgtcagtactccattgatgtgtttgagtgaatccacaaattcaacggaaagaaatgtaatgtggggaggatgtggcacaaagattttctccttttctaatgatttcaccattcagaaactcattgagacaagaacaagccaactgttttcttatgcagctttcagtgattccaacatcataacagtggtggtagacactgctctctatattgctaagcaaaatagccctgttgtggaagtgtgggataagaaaactgaaaaactctgtggactaatagactgcgtgcactttttaagggaggtaatggtaaaagaaaacaaggaatcaaaacacaaaatgtcttattctgggagagtgaaaaccctctgccttcagaagaacactgctctttggataggaactggaggaggccatattttactcctggatctttcaactcgtcgacttatacgtgtaatttacaacttttgtaattcggtcagagtcatgatgacagcacagctaggaagccttaaaaatgtcatgctggtattgggctacaaccggaaaaatactgaaggtacacaaaagcagaaagagatacaatcttgcttgaccgtttgggacatcaatcttccacatgaagtgcaaaatttagaaaaacacattgaagtgagaaaagaattagctgaaaaaatgagacgaacatctgttgagtaagagagaaataggaattgtctttggataggaaaattattctctcctcttgtaaatatttattttaaaaatgttcacatggaaagggtactcacattttttgaaatagctcgtgtgtatgaaggaatgttattatttttaatttaaatatatgtaaaaatacttaccagtaaatgtgtattttaaagaactatttaaaacacaatgttatatttcttataaataccagttactttcgttcattaattaatgaaaataaatctgtgaagtacctaatttaagtactcatactaaaatttataaggccgataattttttgttttcttgtctgtaatggaggtaaactttattttaaattctgtgcttaagacaggactattgcttgtcgatttttctagaaatctgcacggtataatgaaaatattaagacagtttcccatgtaatgtattccttcttagattgcatcgaaatgcactatcatatatgcttgtaaatattcaaatgaatttgcactaataaagtcctttgttggtatgtgaattctctttgttgctgttgcaaacagtgcatcttacacaacttcactcaattcaaaagaaaactccattaaaagtactaatgaaaaaacatgacatactgtcaaagtcctcatatctaggaaagacacagaaactctctttgtcacagaaactctctgtgtctttcctagacataatagagttgtttttcaactctatgtttgaatgtggataccctgaattttgtataattagtgtaaatacagtgttcagtccttcaagtgatatttttatttttttattcataccactagctacttgttttctaatctgcttcattctaatgcttatattcatcttttccctaaatttgtgatgctgcagatcctacatcattcagatagaaacctttttttttttcagaattatagaattccacagctcctaccaagaccatgaggataaatatctaacacttttcagttgctgaaggagaaaggagctttagttatgatggataaaaatatctgccaccctaggcttccaaattatacttaaattgtttacatagcttaccacaataggagtatcagggccaaatacctatgtaataatttgaggtcatttctgctttaggaaaagtactttcggtaaattctttggccctgaccagtattcattatttcagataattccctgtgataggacaactagtacatttaatattctcagaacttatggcattttactatgtgaaaactttaaatttatttatattaagggtaatcaaattcttaaagatgaaagattttctgtattttaaaggaagctatgctttaacttgttatgtaattaacaaaaaaatcatatataatagagctctttgttccagtgttatctctttcattgttactttgtatttgcaattttttttaccaaagacaaattaaaaaaatgaataccatatttaaatggaataataaaggttttttaaaaactttaaa

SEQ ID NO: 58 - DNA, 7611 bp, Homo sapiens
  source 1..7611: mol_type = unassigned DNA
atggctagtggcagctgtcaggggtgcgaagaggacgaggaaactctgaagaagttgatagtcaggctgaacaatgtccaggaaggaaaacagatagaaacgctggtccaaatcctggaggatctgctggtgttcacgtactccgagcgcgcctccaagttatttcaaggcaaaaatatccatgtgcctctgttgatcgtcttggactcctatatgagagtcgcgagtgtgcagcaggtgggttggtcacttctgtgcaaattaatagaagtctgtccaggtacaatgcaaagcttaatgggaccccaggatgttggaaatgattgggaagtccttggtgttcaccaattgattcttaaaatgctaacagttcataatgccagtgtaaacttgtcagtgattggactgaagaccttagatctcctcctaacttcaggtaaaatcaccttgctgatattggatgaagaaagtgatattttcatgttaatttttgatgccatgcactcatttccagccaatgatgaagtccagaaacttggatgcaaagctttacatgtgctgtttgagagagtctcagaggagcaactgactgaatttgttgagaacaaagattatatgatattgttaagtgcgttaacaaattttaaagatgaagaggaaattgtgcttcatgtgctgcattgtttacattccctagcgattccttgcaataatgtggaagtcctcatgagtggcaatgtcaggtgttataatattgtggtggaagctatgaaagcattccctatgagtgaaagaattcaagaagtgagttgctgtttgctccataggcttacattaggtaattttttcaatatcctggtattaaacgaagtccatgagtttgtggtgaaagctgtgcagcagtacccagagaatgcagcattgcagatctcagcgctcagctgtttggccctcctcactgagactattttcttaaatcaagatttagaggaaaagaatgagaatcaagagaatgatgatgagggggaagaagataaattgttttggctggaagcctgttacaaagcattaacgtggcatagaaagaacaagcacgtgcaggaggccgcatgctgggcactaaataatctccttatgtaccaaaacagtttacatgagaagattggagatgaagatggccatttcccagctcatagggaagtgatgctctccatgctgatgcattcttcatcaaaggaagttttccaggcatctgcgaatgcattgtcaactctcttagaacaaaatgttaatttcagaaaaatactgttatcaaaaggaatacacctgaatgttttggagttaatgcagaagcatatacattctcctgaagtggctgaaagtggctgtaaaatgctaaatcatctttttgaaggaagcaacacttccctggatataatggcagcagtggtccccaaaatactaacagttatgaaacgtcatgagacatcattaccagtgcagctggaggcgcttcgagctattttacattttatagtgcctggcatgccagaagaatccagggaggatacagaatttcatcataagctaaatatggttaaaaaacagtgtttcaagaatgatattcacaaactggtcctagcagctttgaacaggttcattggaaatcctgggattcagaaatgtggattaaaagtaatttcttctattgtacattttcctgatgcattagagatgttatccctggaaggtgctatggattcagtgcttcacacactgcagatgtatccagatgaccaagaaattcagtgtctgggtttaagtcttataggatacttgattacaaagaagaatgtgttcataggaactggacatctgctggcaaaaattctggtttccagcttataccgatttaaggatgttgctgaaatacagactaaaggatttcagacaatcttagcaatcctcaaattgtcagcatctttttctaagctgctggtgcatcattcatttgacttagtaatattccatcaaatgtcttccaatatcatggaacaaaaggatcaacagtttctaaacctctgttgcaagtgttttgcaaaagtagctatggatgattacttaaaaaatgtgatgctagagagagcgtgtgatcagaataacagcatcatggttgaatgcttgcttctattgggagcagatgccaatcaagcaaaggagggatcttctttaatttgtcaggtatgtgagaaagagagcagtcccaaattggtggaactcttactgaatagtggatctcgtgaacaagatgtacgaaaagcgttgacgataagcattgggaaaggtgacagccagatcatcagcttgctcttaaggaggctggccctggatgtggccaacaatagcatttgccttggaggattttgtataggaaaagttgaaccttcttggcttggtcctttatttccagataagacttctaatttaaggaaacaaacaaatatagcatctacactagcaagaatggtgatcagatatcagatgaaaagtgctgtggaagaaggaacagcctcaggcagcgatggaaatttttctgaagatgtgctgtctaaatttgatgaatggacctttattcctgactcttctatggacagtgtgtttgctcaaagtgatgacctggatagtgaaggaagtgaaggctcatttcttgtgaaaaagaaatctaattcaattagtgtaggagaattttaccgagatgccgtattacagcgttgctcaccaaatttgcaaagacattccaattccttggggcccatttttgatcatgaagatttactgaagcgaaaaagaaaaatattatcttcagatgattcactcaggtcatcaaaacttcaatcccatatgaggcattcagacagcatttcttctctggcttctgagagagaatatattacatcactagacctttcagcaaatgaactaagagatattgatgccctaagccagaaatgctgtataagtgttcatttggagcatcttgaaaagctggagcttcaccagaatgcactcacgagctttccacaacagctatgtgaaactctgaagagtttgacacatttggacttgcacagtaataaatttacatcatttccttcttatttgttgaaaatgagttgtattgctaatcttgatgtctctcgaaatgacattggaccctcagtggttttagatcctacagtgaaatgtccaactctgaaacagtttaacctgtcatataaccagctgtcttttgtacctgagaacctcactgatgtggtagagaaactggagcagctcattttagaaggaaataaaatatcagggatatgctcccccttgagactgaaggaactgaagattttaaaccttagtaagaaccacatttcatccctatcagagaactttcttgaggcttgtcctaaagtggagagtttcagtgccagaatgaattttcttgctgctatgcctttcttgcctccttctatgacaatcctaaaattatctcagaacaaattttcctgtattccagaagcaattttaaatcttccacacttgcggtctttagatatgagcagcaatgatattcagtacctaccaggtcccgcacactggaaatctttgaacttaagggaactcttatttagccataatcagatcagcatcttggacttgagtgaaaaagcatatttatggtctagagtagagaaactgcatctttctcacaataaactgaaagagattcctcctgagattggctgtcttgaaaatctgacatctctggatgtcagttacaacttggaactaagatcctttcccaatgaaatggggaaattaagcaaaatatgggatcttcctttggatgaactgcatcttaactttgattttaaacatataggatgtaaagccaaagacatcataaggtttcttcaacagcgattaaaaaaggctgtgccttataaccgaatgaaacttatgattgtgggaaatactgggagtggtaaaaccaccttattgcagcaattaatgaaaaccaagaaatcagatcttggaatgcaaagtgccacagttggcatagatgtgaaagactggcctatccaaataagagacaaaagaaagagagatctcgtcctaaatgtgtgggattttgcaggtcgtgaggaattctatagtactcatccccattttatgacgcagcgagcattgtaccttgctgtctatgacctcagcaagggacaggctgaagttgatgccatgaagccttggctcttcaatataaaggctcgcgcttcttcttcccctgtgattctcgttggcacacatttggatgtttctgatgagaagcaacgcaaagcctgcatgagtaaaatcaccaaggaactcctgaataagcgagggttccctgccatacgagattaccactttgtgaatgccaccgaggaatctgatgctttggcaaaacttcggaaaaccatcataaacgagagccttaatttcaagatccgagatcagcttgttgttggacagctgattccagactgctatgtagaacttgaaaaaatcattttatcggagcgtaaaaatgtgccaattgaatttcccgtaattgaccggaaacgattattacaactagtgagagaaaatcagctgcagttagatgaaaatgagcttcctcacgcagttcactttctaaatgaatcaggagtccttcttcattttcaagacccagcactgcagttaagtgacttgtactttgtggaacccaagtggctttgtaaaatcatggcacagattttgacagtgaaagtggaaggttgtccaaaacaccctaagggcattatttcgcgtagagatgtggaaaaatttctttcaaaaaaaaggaaatttccaaagaactacatgtcacagtattttaagctcctagaaaaattccagattgctttgccaataggagaagaatatttgctggttccaagcagtttgtctgaccacaggcctgtgatagagcttccccattgtgagaactctgaaattatcatccgactatatgaaatgccttattttccaatgggattttggtcaagattaatcaatcgattacttgagatttcaccttacatgctttcagggagagaacgagcacttcgcccaaacagaatgtattggcgacaaggcatttacttaaattggtctcctgaagcttattgtctggtaggatctgaagtcttagacaatcatccagagagtttcttaaaaattacagttccttcttgtagaaaaggctgtattcttttgggccaagttgtggaccacattgattctctcatggaagaatggtttcctgggttgctggagattgatatttgtggtgaaggagaaactctgttgaagaaatgggcattatatagttttaatgatggtgaagaacatcaaaaaatcttacttgatgacttgatgaagaaagcagaggaaggagatctcttagtaaatccagatcaaccaaggctcaccattccaatatctcagattgcccctgacttgattttggctgacctgcctagaaatattatgttgaataatgatgagttggaatttgaacaagctccagagtttctcctaggtgatggcagttttggatcagtttaccgagcagcctatgaaggagaagaagtggctgtgaagatttttaataaacatacatcactcaggctgttaagacaagagcttgtggtgctttgccacctccaccaccccagtttgatatctttgctggcagctgggattcgtccccggatgttggtgatggagttagcctccaagggttccttggatcgcctgcttcagcaggacaaagccagcctcactagaaccctacagcacaggattgcactccacgtagctgatggtttgagatacctccactcagccatgattatataccgagacctgaaaccccacaatgtgctgcttttcacactgtatcccaatgctgccatcattgcaaagattgctgactacagcattgctcagtactgctgtagaatggggataaaaacatcagagggcacaccagggtttcgtgcacctgaagttgccagaggaaatgtcatttataaccaacaggctgatgtttattcatttggtttactactctatgacattttgacaactggaggtagaatagtagagggtttgaagtttccaaatgagtttgatgaattagaaatacaaggaaaattacctgatccagttaaagaatatggttgtgccccatggcctatggttgagaaattaattaaacagtgtttgaaagaaaatcctcaagaaaggcctacttctgcccaggtctttgacattttgaattcagctgaattagtctgtctgacgagacgcattttattacctaaaaacgtaattgttgaatgcatggttgctacacatcacaacagcaggaatgcaagcatttggctgggctgtgggcacaccgacagaggacagctctcatttcttgacttaaatactgaaggatacacttctgaggaagttgctgatagtagaatattgtgcttagccttggtgcatcttcctgttgaaaaggaaagctggattgtgtctgggacacagtctggtactctcctggtcatcaataccgaagatgggaaaaagagacataccctagaaaagatgactgattctgtcacttgtttgtattgcaattccttttccaagcaaagcaaacaaaaaaattttcttttggttggaaccgctgatggcaagttagcaatttttgaagataagactgttaagcttaaaggagctgctcctttgaagatactaaatataggaaatgtcagtactccattgatgtgtttgagtgaatccacaaattcaacggaaagaaatgtaatgtggggaggatgtggcacaaagattttctccttttctaatgatttcaccattcagaaactcattgagacaagaacaagccaactgttttcttatgcagctttcagtgattccaacatcataacagtggtggtagacactgctctctatattgctaagcaaaatagccctgttgtggaagtgtgggataagaaaactgaaaaactctgtggactaatagactgcgtgcactttttaagggaggtaatggtaaaagaaaacaaggaatcaaaacacaaaatgtcttattctgggagagtgaaaaccctctgccttcagaagaacactgctctttggataggaactggaggaggccatattttactcctggatctttcaactcgtcgacttatacgtgtaatttacaacttttgtaattcggtcagagtcatgatgacagcacagctaggaagccttaaaaatgtcatgctggtattgggctacaaccggaaaaatactgaaggtacacaaaagcagaaagagatacaatcttgcttgaccgtttgggacatcaatcttccacatgaagtgcaaaatttagaaaaacacattgaagtgagaaaagaattagctgaaaaaatgagacgaacatctgttgagtacccatacgacgtcccagactacgcttaa

SEQ ID NO: 59 - DNA, 17 bp, synthetic construct
  source 1..17: mol_type = other DNA; note = Description of Artificial Sequence: Synthetic primer
cccggatgttggtgatg

SEQ ID NO: 60 - DNA, 25 bp, synthetic construct
  source 1..25: mol_type = other DNA; note = Description of Artificial Sequence: Synthetic primer
agttgtcaaaatgtcatagagtagt

SEQ ID NO: 61 - DNA, 50 bp, synthetic construct
  source 1..50: mol_type = other DNA; note = Description of Artificial Sequence: Synthetic oligonucleotide; note = Description of Combined DNA/RNA Molecule: Synthetic oligonucleotide
  modified_base 1: mod_base = OTHER; note = 2'-O-Methyluridine phosphorothioate
  modified_base 2: mod_base = OTHER; note = 2'-O-Methyluridine phosphorothioate
  modified_base 3: mod_base = OTHER; note = 2'-O-Methyluridine phosphorothioate
  modified_base 4: mod_base = OTHER; note = 2'-O-Methyluridine phosphorothioate
  modified_base 5: mod_base = OTHER; note = 2'-O-Methyluridine
  modified_base 6: mod_base = OTHER; note = 2'-O-Methyladenosine
  modified_base 7: mod_base = OTHER; note = 2'-O-Methyluridine
  modified_base 8: mod_base = OTHER; note = 2'-O-Methylcytosine
  modified_base 9: mod_base = OTHER; note = 2'-O-Methylcytosine
  modified_base 10: mod_base = OTHER; note = 2'-O-Methylcytosine
  modified_base 11: mod_base = OTHER; note = 2'-O-Methylcytosine
  modified_base 12: mod_base = OTHER; note = 2'-O-Methyladenosine
  modified_base 13: mod_base = OTHER; note = 2'-O-Methyluridine
  modified_base 14: mod_base = OTHER; note = 2'-O-Methyluridine
  modified_base 15: mod_base = OTHER; note = 2'-O-Methylcytosine
  modified_base 16: mod_base = OTHER; note = 2'-O-Methyluridine
  modified_base 17: mod_base = OTHER; note = 2'-O-Methyladenosine
  modified_base 18: mod_base = OTHER; note = 2'-O-Methylcytosine
  modified_base 19: mod_base = OTHER; note = 2'-O-Methyladenosine
  modified_base 20: mod_base = OTHER; note = 2'-O-Methylguanosine
  modified_base 21: mod_base = OTHER; note = 2'-O-Methylcytosine
  modified_base 22: mod_base = OTHER; note = 2'-O-Methyladenosine
  modified_base 23: mod_base = OTHER; note = 2'-O-Methylguanosine
  modified_base 24: mod_base = OTHER; note = 2'-O-Methyluridine
  modified_base 25: mod_base = OTHER; note = 2'-O-Methyladenosine
  modified_base 26: mod_base = OTHER; note = 2'-O-Methylcytosine
  modified_base 27: mod_base = OTHER; note = 2'-O-Methyluridine
  modified_base 28: mod_base = OTHER; note = 2'-O-Methylguanosine
  modified_base 29: mod_base = OTHER; note = 2'-O-Methyladenosine
  modified_base 30: mod_base = OTHER; note = 2'-O-Methylguanosine
  modified_base 31: mod_base = OTHER; note = 2'-O-Methylcytosine
  modified_base 32: mod_base = OTHER; note = 2'-O-Methyladenosine
  modified_base 33: mod_base = OTHER; note = 2'-O-Methyladenosine
  modified_base 34: mod_base = OTHER; note = 2'-O-Methyluridine
  modified_base 35: mod_base = OTHER; note = 2'-O-Methylguanosine
  modified_base 39: mod_base = OTHER; note = 2'-O-Methyluridine
  modified_base 40: mod_base = OTHER; note = 2'-O-Methyladenosine
  modified_base 41: mod_base = OTHER; note = 2'-O-Methylguanosine
  modified_base 42: mod_base = OTHER; note = 2'-O-Methyluridine
  modified_base 43: mod_base = OTHER; note = 2'-O-Methylcytosine
  modified_base 44: mod_base = OTHER; note = 2'-O-Methyladenosine
  modified_base 45: mod_base = OTHER; note = 2'-O-Methylguanosine
  modified_base 46: mod_base = OTHER; note = 2'-O-Methylcytosine phosphorothioate
  modified_base 47: mod_base = OTHER; note = 2'-O-Methyladenosine phosphorothioate
  modified_base 48: mod_base = OTHER; note = 2'-O-Methyladenosine phosphorothioate
  modified_base 49: mod_base = OTHER; note = 2'-O-Methyluridine phosphorothioate
  modified_base 50: mod_base = OTHER; note = 2'-O-Methylcytosine
  misc_feature 1..35: note = RNA
  misc_feature 36..38: note = DNA
  misc_feature 39..50: note = RNA
tttttatccccattctacagcagtactgagcaatgccgtagtcagcaatc

SEQ ID NO: 62 - DNA, 50 bp, synthetic construct
  source 1..50: mol_type = other DNA; note = Description of Artificial Sequence: Synthetic oligonucleotide; note = Description of Combined DNA/RNA Molecule: Synthetic oligonucleotide
  modified_base 1: mod_base = OTHER; note = 2'-O-Methyluridine phosphorothioate
  modified_base 2: mod_base = OTHER; note = 2'-O-Methyluridine phosphorothioate
  modified_base 3: mod_base = OTHER; note = 2'-O-Methyluridine phosphorothioate
  modified_base 4: mod_base = OTHER; note = 2'-O-Methyluridine phosphorothioate
  modified_base 5: mod_base = OTHER; note = 2'-O-Methyluridine
  modified_base 6: mod_base = OTHER; note = 2'-O-Methyladenosine
  modified_base 7: mod_base = OTHER; note = 2'-O-Methyluridine
  modified_base 8: mod_base = OTHER; note = 2'-O-Methylcytosine
  modified_base 9: mod_base = OTHER; note = 2'-O-Methylcytosine
  modified_base 10: mod_base = OTHER; note = 2'-O-Methylcytosine
  modified_base 11: mod_base = OTHER; note = 2'-O-Methylcytosine
  modified_base 12: mod_base = OTHER; note = 2'-O-Methyladenosine
  modified_base 13: mod_base = OTHER; note = 2'-O-Methyluridine
  modified_base 14: mod_base = OTHER; note = 2'-O-Methyluridine
  modified_base 15: mod_base = OTHER; note = 2'-O-Methylcytosine
  modified_base 16: mod_base = OTHER; note = 2'-O-Methyluridine
  modified_base 17: mod_base = OTHER; note = 2'-O-Methyladenosine
  modified_base 18: mod_base = OTHER; note = 2'-O-Methylcytosine
  modified_base 19: mod_base = OTHER; note = 2'-O-Methyladenosine
  modified_base 20: mod_base = OTHER; note = 2'-O-Methylguanosine
  modified_base 21: mod_base = OTHER; note = 2'-O-Methylguanosine
  modified_base 22: mod_base = OTHER; note = 2'-O-Methyladenosine
  modified_base 23: mod_base = OTHER; note = 2'-O-Methylguanosine
  modified_base 24: mod_base = OTHER; note = 2'-O-Methyluridine
  modified_base 25: mod_base = OTHER; note = 2'-O-Methylcytosine
  modified_base 26: mod_base = OTHER; note = 2'-O-Methylcytosine
  modified_base 27: mod_base = OTHER; note = 2'-O-Methyluridine
  modified_base 28: mod_base = OTHER; note = 2'-O-Methylguanosine
  modified_base 29: mod_base = OTHER; note = 2'-O-Methyladenosine
  modified_base 30: mod_base = OTHER; note = 2'-O-Methylguanosine
  modified_base 31: mod_base = OTHER; note = 2'-O-Methylcytosine
  modified_base 32: mod_base = OTHER; note = 2'-O-Methyladenosine
  modified_base 33: mod_base = OTHER; note = 2'-O-Methyladenosine
  modified_base 34: mod_base = OTHER; note = 2'-O-Methyluridine
  modified_base 35: mod_base = OTHER; note = 2'-O-Methylguanosine
  modified_base 39: mod_base = OTHER; note = 2'-O-Methyluridine
  modified_base 40: mod_base = OTHER; note = 2'-O-Methyladenosine
  modified_base 41: mod_base = OTHER; note = 2'-O-Methylguanosine
  modified_base 42: mod_base = OTHER; note = 2'-O-Methyluridine
  modified_base 43: mod_base = OTHER; note = 2'-O-Methylcytosine
  modified_base 44: mod_base = OTHER; note = 2'-O-Methyladenosine
  modified_base 45: mod_base = OTHER; note = 2'-O-Methylguanosine
  modified_base 46: mod_base = OTHER; note = 2'-O-Methylcytosine phosphorothioate
  modified_base 47: mod_base = OTHER; note = 2'-O-Methyladenosine phosphorothioate
  modified_base 48: mod_base = OTHER; note = 2'-O-Methyladenosine phosphorothioate
  modified_base 49: mod_base = OTHER; note = 2'-O-Methyluridine phosphorothioate
  modified_base 50: mod_base = OTHER; note = 2'-O-Methylcytosine
  misc_feature 1..35: note = RNA
  misc_feature 36..38: note = DNA
  misc_feature 39..50: note = RNA
tttttatccccattctacaggagtcctgagcaatgccgtagtcagcaatc

SEQ ID NO: 63 - DNA, 50 bp, synthetic construct
  source 1..50: mol_type = other DNA; note = Description of Artificial Sequence: Synthetic oligonucleotide; note = Description of Combined DNA/RNA Molecule: Synthetic oligonucleotide
  modified_base 1: mod_base = OTHER; note = 2'-O-Methyluridine phosphorothioate
  modified_base 2: mod_base = OTHER; note = 2'-O-Methyluridine phosphorothioate
  modified_base 3: mod_base = OTHER; note = 2'-O-Methyluridine phosphorothioate
  modified_base 4: mod_base = OTHER; note = 2'-O-Methyluridine phosphorothioate
  modified_base 5: mod_base = OTHER; note = 2'-O-Methyluridine
  modified_base 6: mod_base = OTHER; note = 2'-O-Methyladenosine
  modified_base 7: mod_base = OTHER; note = 2'-O-Methyluridine
  modified_base 8: mod_base = OTHER; note = 2'-O-Methylcytosine
  modified_base 9: mod_base = OTHER; note = 2'-O-Methylcytosine
  modified_base 10: mod_base = OTHER; note = 2'-O-Methylcytosine
  modified_base 11: mod_base = OTHER; note = 2'-O-Methylcytosine
  modified_base 12: mod_base = OTHER; note = 2'-O-Methyladenosine
  modified_base 13: mod_base = OTHER; note = 2'-O-Methyluridine
  modified_base 14: mod_base = OTHER; note = 2'-O-Methyluridine
  modified_base 15: mod_base = OTHER; note = 2'-O-Methylcytosine
  modified_base 16: mod_base = OTHER; note = 2'-O-Methyluridine
  modified_base 17: mod_base = OTHER; note = 2'-O-Methyladenosine
  modified_base 18: mod_base = OTHER; note = 2'-O-Methylcytosine
  modified_base 19: mod_base = OTHER; note = 2'-O-Methyladenosine
  modified_base 20: mod_base = OTHER; note = 2'-O-Methyladenosine
  modified_base 21: mod_base = OTHER; note = 2'-O-Methylcytosine
  modified_base 22: mod_base = OTHER; note = 2'-O-Methyladenosine
  modified_base 23: mod_base = OTHER; note = 2'-O-Methylguanosine
  modified_base 24: mod_base = OTHER; note = 2'-O-Methylcytosine
  modified_base 25: mod_base = OTHER; note = 2'-O-Methyladenosine
  modified_base 26: mod_base = OTHER; note = 2'-O-Methylcytosine
  modified_base 27: mod_base = OTHER; note = 2'-O-Methyluridine
  modified_base 28: mod_base = OTHER; note = 2'-O-Methylguanosine
  modified_base 29: mod_base = OTHER; note = 2'-O-Methyladenosine
  modified_base 30: mod_base = OTHER; note = 2'-O-Methylguanosine
  modified_base 31: mod_base = OTHER; note = 2'-O-Methylcytosine
  modified_base 32: mod_base = OTHER; note = 2'-O-Methyladenosine
  modified_base 33: mod_base = OTHER; note = 2'-O-Methyladenosine
  modified_base 34: mod_base = OTHER; note = 2'-O-Methyluridine
  modified_base 35: mod_base = OTHER; note = 2'-O-Methylguanosine
  modified_base 39: mod_base = OTHER; note = 2'-O-Methyluridine
  modified_base 40: mod_base = OTHER; note = 2'-O-Methyladenosine
  modified_base 41: mod_base = OTHER; note = 2'-O-Methylguanosine
  modified_base 42: mod_base = OTHER; note = 2'-O-Methyluridine
  modified_base 43: mod_base = OTHER; note = 2'-O-Methylcytosine
  modified_base 44: mod_base = OTHER; note = 2'-O-Methyladenosine
  modified_base 45: mod_base = OTHER; note = 2'-O-Methylguanosine
  modified_base 46: mod_base = OTHER; note = 2'-O-Methylcytosine phosphorothioate
  modified_base 47: mod_base = OTHER; note = 2'-O-Methyladenosine phosphorothioate
  modified_base 48: mod_base = OTHER; note = 2'-O-Methyladenosine phosphorothioate
  modified_base 49: mod_base = OTHER; note = 2'-O-Methyluridine phosphorothioate
  modified_base 50: mod_base = OTHER; note = 2'-O-Methylcytosine
  misc_feature 1..35: note = RNA
  misc_feature 36..38: note = DNA
  misc_feature 39..50: note = RNA
tttttatccccattctacaacagcactgagcaatgccgtagtcagcaatc

SEQ ID NO: 64 - DNA, 50 bp, synthetic construct
  source 1..50: mol_type = other DNA; note = Description of Artificial Sequence: Synthetic oligonucleotide; note = Description of Combined DNA/RNA Molecule: Synthetic oligonucleotide
  modified_base 1: mod_base = OTHER; note = 2'-O-Methyluridine phosphorothioate
  modified_base 2: mod_base = OTHER; note = 2'-O-Methyluridine phosphorothioate
  modified_base 3: mod_base = OTHER; note = 2'-O-Methyluridine phosphorothioate
  modified_base 4: mod_base = OTHER; note = 2'-O-Methyluridine phosphorothioate
  modified_base 5: mod_base = OTHER; note = 2'-O-Methyluridine
  modified_base 6: mod_base = OTHER; note = 2'-O-Methyladenosine
  modified_base 7: mod_base = OTHER; note = 2'-O-Methyluridine
  modified_base 8: mod_base = OTHER; note = 2'-O-Methylcytosine
  modified_base 9: mod_base = OTHER; note = 2'-O-Methylcytosine
  modified_base 10: mod_base = OTHER; note = 2'-O-Methylcytosine
  modified_base 11: mod_base = OTHER; note = 2'-O-Methylcytosine
  modified_base 12: mod_base = OTHER; note = 2'-O-Methyladenosine
  modified_base 13: mod_base = OTHER; note = 2'-O-Methyluridine
  modified_base 14: mod_base = OTHER; note = 2'-O-Methyluridine
  modified_base 15: mod_base = OTHER; note = 2'-O-Methylcytosine
  modified_base 16: mod_base = OTHER; note = 2'-O-Methylcytosine
  modified_base 17: mod_base = OTHER; note = 2'-O-Methyladenosine
  modified_base 18: mod_base = OTHER; note = 2'-O-Methylcytosine
  modified_base 19: mod_base = OTHER; note = 2'-O-Methyladenosine
  modified_base 20: mod_base = OTHER; note = 2'-O-Methyladenosine
  modified_base 21: mod_base = OTHER; note = 2'-O-Methylcytosine
  modified_base 22: mod_base = OTHER; note = 2'-O-Methyladenosine
  modified_base 23: mod_base = OTHER; note = 2'-O-Methylguanosine
  modified_base 24: mod_base = OTHER; note = 2'-O-Methyluridine
  modified_base 25: mod_base = OTHER; note = 2'-O-Methyladenosine
  modified_base 26: mod_base = OTHER; note = 2'-O-Methylcytosine
  modified_base 27: mod_base = OTHER; note = 2'-O-Methyluridine
  modified_base 28: mod_base = OTHER; note = 2'-O-Methylguanosine
  modified_base 29: mod_base = OTHER; note = 2'-O-Methyladenosine
  modified_base 30: mod_base = OTHER; note = 2'-O-Methylguanosine
  modified_base 31: mod_base = OTHER; note = 2'-O-Methylcytosine
  modified_base 32: mod_base = OTHER; note = 2'-O-Methyladenosine
  modified_base 33: mod_base = OTHER; note = 2'-O-Methyladenosine
  modified_base 34: mod_base = OTHER; note = 2'-O-Methyluridine
  modified_base 35: mod_base = OTHER; note = 2'-O-Methylguanosine
  modified_base 39: mod_base = OTHER; note = 2'-O-Methyluridine
  modified_base 40: mod_base = OTHER; note = 2'-O-Methyladenosine
  modified_base 41: mod_base = OTHER; note = 2'-O-Methylguanosine
  modified_base 42: mod_base = OTHER; note = 2'-O-Methyluridine
  modified_base 43: mod_base = OTHER; note = 2'-O-Methylcytosine
  modified_base 44: mod_base = OTHER; note = 2'-O-Methyladenosine
  modified_base 45: mod_base = OTHER; note = 2'-O-Methylguanosine
  modified_base 46: mod_base = OTHER; note = 2'-O-Methylcytosine phosphorothioate
  modified_base 47: mod_base = OTHER; note = 2'-O-Methyladenosine phosphorothioate
  modified_base 48: mod_base = OTHER; note = 2'-O-Methyladenosine phosphorothioate
  modified_base 49: mod_base = OTHER; note = 2'-O-Methyluridine phosphorothioate
  modified_base 50: mod_base = OTHER; note = 2'-O-Methylcytosine
  misc_feature 1..35: note = RNA
  misc_feature 36..38: note = DNA
  misc_feature 39..50: note = RNA
tttttatccccattccacaacagtactgagcaatgccgtagtcagcaatc

SEQ ID NO: 65 - RNA, 50 nt, synthetic construct
  source 1..50: mol_type = other RNA; note = Description of Artificial Sequence: Synthetic oligonucleotide
  modified_base 1: mod_base = OTHER; note = 2'-O-Methyluridine phosphorothioate
  modified_base 2: mod_base = OTHER; note = 2'-O-Methyluridine phosphorothioate
  modified_base 3: mod_base = OTHER; note = 2'-O-Methyluridine phosphorothioate
  modified_base 4: mod_base = OTHER; note = 2'-O-Methyluridine phosphorothioate
  modified_base 5: mod_base = OTHER; note = 2'-O-Methyluridine
  modified_base 6: mod_base = OTHER; note = 2'-O-Methyladenosine
  modified_base 7: mod_base = OTHER; note = 2'-O-Methyluridine
  modified_base 8: mod_base = OTHER; note = 2'-O-Methylcytosine
  modified_base 9: mod_base = OTHER; note = 2'-O-Methylcytosine
  modified_base 10: mod_base = OTHER; note = 2'-O-Methylcytosine
  modified_base 11: mod_base = OTHER; note = 2'-O-Methylcytosine
  modified_base 12: mod_base = OTHER; note = 2'-O-Methyladenosine
  modified_base 13: mod_base = OTHER; note = 2'-O-Methyluridine
  modified_base 14: mod_base = OTHER; note = 2'-O-Methyluridine
  modified_base 15: mod_base = OTHER; note = 2'-O-Methylcytosine
  modified_base 16: mod_base = OTHER; note = 2'-O-Methyluridine
  modified_base 17: mod_base = OTHER; note = 2'-O-Methyladenosine
  modified_base 18: mod_base = OTHER; note = 2'-O-Methylcytosine
  modified_base 19: mod_base = OTHER; note = 2'-O-Methyladenosine
  modified_base 20: mod_base = OTHER; note = 2'-O-Methylguanosine
  modified_base 21: mod_base = OTHER; note = 2'-O-Methylcytosine
  modified_base 22: mod_base = OTHER; note = 2'-O-Methyladenosine
  modified_base 23: mod_base = OTHER; note = 2'-O-Methylguanosine
  modified_base 24: mod_base = OTHER; note = 2'-O-Methyluridine
  modified_base 25: mod_base = OTHER; note = 2'-O-Methyladenosine
  modified_base 26: mod_base = OTHER; note = 2'-O-Methylcytosine
  modified_base 27: mod_base = OTHER; note = 2'-O-Methyluridine
  modified_base 28: mod_base = OTHER; note = 2'-O-Methylguanosine
  modified_base 29: mod_base = OTHER; note = 2'-O-Methyladenosine
  modified_base 30: mod_base = OTHER; note = 2'-O-Methylguanosine
  modified_base 31: mod_base = OTHER; note = 2'-O-Methylcytosine
  modified_base 32: mod_base = OTHER; note = 2'-O-Methyladenosine
  modified_base 33: mod_base = OTHER; note = 2'-O-Methyladenosine
  modified_base 34: mod_base = OTHER; note = 2'-O-Methyluridine
  modified_base 35: mod_base = OTHER; note = 2'-O-Methylguanosine
  modified_base 36: mod_base = OTHER; note = 2'-F-arabinose cytosine
  modified_base 37: mod_base = OTHER; note = 2'-F-arabinose cytosine
  modified_base 38: mod_base = OTHER; note = 2'-F-arabinose guanosine
  modified_base 39: mod_base = OTHER; note = 2'-O-Methyluridine
  modified_base 40: mod_base = OTHER; note = 2'-O-Methyladenosine
  modified_base 41: mod_base = OTHER; note = 2'-O-Methylguanosine
  modified_base 42: mod_base = OTHER; note = 2'-O-Methyluridine
  modified_base 43: mod_base = OTHER; note = 2'-O-Methylcytosine
  modified_base 44: mod_base = OTHER; note = 2'-O-Methyladenosine
  modified_base 45: mod_base = OTHER; note = 2'-O-Methylguanosine
  modified_base 46: mod_base = OTHER; note = 2'-O-Methylcytosine phosphorothioate
  modified_base 47: mod_base = OTHER; note = 2'-O-Methyladenosine phosphorothioate
  modified_base 48: mod_base = OTHER; note = 2'-O-Methyladenosine phosphorothioate
  modified_base 49: mod_base = OTHER; note = 2'-O-Methyluridine phosphorothioate
  modified_base 50: mod_base = OTHER; note = 2'-O-Methylcytosine
tttttatccccattctacagcagtactgagcaatgccgtagtcagcaatc

SEQ ID NO: 66 - RNA, 50 nt, synthetic construct
  source 1..50: mol_type = other RNA; note = Description of Artificial Sequence: Synthetic oligonucleotide
  modified_base 1: mod_base = OTHER; note = 2'-O-Methyluridine phosphorothioate
  modified_base 2: mod_base = OTHER; note = 2'-O-Methyluridine phosphorothioate
  modified_base 3: mod_base = OTHER; note = 2'-O-Methyluridine phosphorothioate
  modified_base 4: mod_base = OTHER; note = 2'-O-Methyluridine phosphorothioate
  modified_base 5: mod_base = OTHER; note = 2'-O-Methyluridine
  modified_base 6: mod_base = OTHER; note = 2'-O-Methyladenosine
  modified_base 7: mod_base = OTHER; note = 2'-O-Methyluridine
  modified_base 8: mod_base = OTHER; note = 2'-O-Methylcytosine
  modified_base 9: mod_base = OTHER; note = 2'-O-Methylcytosine
  modified_base 10: mod_base = OTHER; note = 2'-O-Methylcytosine
  modified_base 11: mod_base = OTHER; note = 2'-O-Methylcytosine
  modified_base 12: mod_base = OTHER; note = 2'-O-Methyladenosine
  modified_base 13: mod_base = OTHER; note = 2'-O-Methyluridine
  modified_base 14: mod_base = OTHER; note = 2'-O-Methyluridine
  modified_base 15: mod_base = OTHER; note = 2'-O-Methylcytosine
  modified_base 16: mod_base = OTHER; note = 2'-O-Methylcytosine
  modified_base 17: mod_base = OTHER; note = 2'-O-Methyladenosine
  modified_base 18: mod_base = OTHER; note = 2'-O-Methylcytosine
  modified_base 19: mod_base = OTHER; note = 2'-O-Methyladenosine
  modified_base 20: mod_base = OTHER; note = 2'-O-Methyladenosine
  modified_base 21: mod_base = OTHER; note = 2'-O-Methylcytosine
  modified_base 22: mod_base = OTHER; note = 2'-O-Methyladenosine
  modified_base 23: mod_base = OTHER; note = 2'-O-Methylguanosine
  modified_base 24: mod_base = OTHER; note = 2'-O-Methyluridine
  modified_base 25: mod_base = OTHER; note = 2'-O-Methyladenosine
  modified_base 26: mod_base = OTHER; note = 2'-O-Methylcytosine
  modified_base 27: mod_base = OTHER; note = 2'-O-Methyluridine
  modified_base 28: mod_base = OTHER; note = 2'-O-Methylguanosine
  modified_base 29: mod_base = OTHER; note = 2'-O-Methyladenosine
  modified_base 30: mod_base = OTHER; note = 2'-O-Methylguanosine
  modified_base 31: mod_base = OTHER; note = 2'-O-Methylcytosine
  modified_base 32: mod_base = OTHER; note = 2'-O-Methyladenosine
  modified_base 33: mod_base = OTHER; note = 2'-O-Methyladenosine
  modified_base 34: mod_base = OTHER; note = 2'-O-Methyluridine
  modified_base 35: mod_base = OTHER; note = 2'-O-Methylguanosine
  modified_base 36: mod_base = OTHER; note = 2'-F-arabinose cytosine
  modified_base 37: mod_base = OTHER; note = 2'-F-arabinose cytosine
  modified_base 38: mod_base = OTHER; note = 2'-F-arabinose guanosine
  modified_base 39: mod_base = OTHER; note = 2'-O-Methyluridine
  modified_base 40: mod_base = OTHER; note = 2'-O-Methyladenosine
  modified_base 41: mod_base = OTHER; note = 2'-O-Methylguanosine
  modified_base 42: mod_base = OTHER; note = 2'-O-Methyluridine
  modified_base 43: mod_base = OTHER; note = 2'-O-Methylcytosine
  modified_base 44: mod_base = OTHER; note = 2'-O-Methyladenosine
  modified_base 45: mod_base = OTHER; note = 2'-O-Methylguanosine
  modified_base 46: mod_base = OTHER; note = 2'-O-Methylcytosine phosphorothioate
  modified_base 47: mod_base = OTHER; note = 2'-O-Methyladenosine phosphorothioate
  modified_base 48: mod_base = OTHER; note = 2'-O-Methyladenosine phosphorothioate
  modified_base 49: mod_base = OTHER; note = 2'-O-Methyluridine phosphorothioate
  modified_base 50: mod_base = OTHER; note = 2'-O-Methylcytosine
tttttatccccattccacaacagtactgagcaatgccgtagtcagcaatc

SEQ ID NO: 67 - DNA, 66 bp, synthetic construct
  source 1..66: mol_type = other DNA; note = Description of Artificial Sequence: Synthetic oligonucleotide; note = Description of Combined DNA/RNA Molecule: Synthetic oligonucleotide
  modified_base 1: mod_base = OTHER; note = 2'-O-Methylguanosine phosphorothioate
  modified_base 2: mod_base = OTHER; note = 2'-O-Methyluridine phosphorothioate
  modified_base 3: mod_base = OTHER; note = 2'-O-Methylguanosine phosphorothioate
  modified_base 4: mod_base = OTHER; note = 2'-O-Methylguanosine phosphorothioate
  modified_base 5: mod_base = OTHER; note = 2'-O-Methyladenosine
  modified_base 6: mod_base = OTHER; note = 2'-O-Methyladenosine
  modified_base 7: mod_base = OTHER; note = 2'-O-Methyluridine
  modified_base 8: mod_base = OTHER; note = 2'-O-Methyladenosine
  modified_base 9: mod_base = OTHER; note = 2'-O-Methylguanosine
  modified_base 10: mod_base = OTHER; note = 2'-O-Methyluridine
  modified_base 11: mod_base = OTHER; note = 2'-O-Methyladenosine
  modified_base 12: mod_base = OTHER; note = 2'-O-Methyluridine
  modified_base 13: mod_base = OTHER; note = 2'-O-Methyladenosine
  modified_base 14: mod_base = OTHER; note = 2'-O-Methyladenosine
  modified_base 15: mod_base = OTHER; note = 2'-O-Methylcytosine
  modified_base 16: mod_base = OTHER; note = 2'-O-Methyladenosine
  modified_base 17: mod_base = OTHER; note = 2'-O-Methyladenosine
  modified_base 18: mod_base = OTHER; note = 2'-O-Methyluridine
  modified_base 19: mod_base = OTHER; note = 2'-O-Methyladenosine
  modified_base 20: mod_base = OTHER; note = 2'-O-Methyluridine
  modified_base 21: mod_base = OTHER; note = 2'-O-Methylguanosine
  modified_base 22: mod_base = OTHER; note = 2'-O-Methylcytosine
  modified_base 23: mod_base = OTHER; note = 2'-O-Methyluridine
  modified_base 24: mod_base = OTHER; note = 2'-O-Methyladenosine
  modified_base 25: mod_base = OTHER; note = 2'-O-Methyladenosine
  modified_base 26: mod_base = OTHER; note = 2'-O-Methyladenosine
  modified_base 27: mod_base = OTHER; note = 2'-O-Methyluridine
  modified_base 28: mod_base = OTHER; note = 2'-O-Methylguanosine
  modified_base 29: mod_base = OTHER; note = 2'-O-Methyluridine
  modified_base 30: mod_base = OTHER; note = 2'-O-Methyluridine
  modified_base 31: mod_base = OTHER; note = 2'-O-Methylguanosine
  modified_base 32: mod_base = OTHER; note = 2'-O-Methyluridine
  modified_base 33: mod_base = OTHER; note = 2'-O-Methyluridine
  modified_base 34: mod_base = OTHER; note = 2'-O-Methyladenosine
  modified_base 35: mod_base = OTHER; note = 2'-O-Methyluridine
  modified_base 36: mod_base = OTHER; note = 2'-O-Methyladenosine
  modified_base 37: mod_base = OTHER; note = 2'-O-Methylguanosine
  modified_base 38: mod_base = OTHER; note = 2'-O-Methyluridine
  modified_base 39: mod_base = OTHER; note = 2'-O-Methyladenosine
  modified_base 40: mod_base = OTHER; note = 2'-O-Methyluridine
  modified_base 41: mod_base = OTHER; note = 2'-O-Methylcytosine
  modified_base 42: mod_base = OTHER; note = 2'-O-Methylcytosine
  modified_base 43: mod_base = OTHER; note = 2'-O-Methylcytosine
  modified_base 44: mod_base = OTHER; note = 2'-O-Methyladenosine
  modified_base 45: mod_base = OTHER; note = 2'-O-Methylcytosine
  modified_base 46: mod_base = OTHER; note = 2'-O-Methylguanosine
  modified_base 47: mod_base = OTHER; note = 2'-O-Methylcytosine
  modified_base 48: mod_base = OTHER; note = 2'-O-Methyladenosine
  modified_base 49: mod_base = OTHER; note = 2'-O-Methyladenosine
  modified_base 50: mod_base = OTHER; note = 2'-O-Methyluridine
  modified_base 51: mod_base = OTHER; note = 2'-O-Methylguanosine
  modified_base 55: mod_base = OTHER; note = 2'-O-Methyluridine
  modified_base 56: mod_base = OTHER; note = 2'-O-Methyladenosine
  modified_base 57: mod_base = OTHER; note = 2'-O-Methylguanosine
  modified_base 58: mod_base = OTHER; note = 2'-O-Methyluridine
  modified_base 59: mod_base = OTHER; note = 2'-O-Methylcytosine
  modified_base 60: mod_base = OTHER; note = 2'-O-Methyladenosine
  modified_base 61: mod_base = OTHER; note = 2'-O-Methylguanosine
  modified_base 62: mod_base = OTHER; note = 2'-O-Methylcytosine phosphorothioate
  modified_base 63: mod_base = OTHER; note = 2'-O-Methyladenosine phosphorothioate
  modified_base 64: mod_base = OTHER; note = 2'-O-Methyladenosine phosphorothioate
  modified_base 65: mod_base = OTHER; note = 2'-O-Methyluridine phosphorothioate
  modified_base 66: mod_base = OTHER; note = 2'-O-Methylcytosine
  misc_feature 1..51: note = RNA
  misc_feature 52..54: note = DNA
  misc_feature 55..66: note = RNA
gtggaatagtataacaatatgctaaatgttgttatagtatcccacgcaatgccgtagtcagcaatc

SEQ ID NO: 68 - RNA, 66 nt, synthetic construct
  source 1..66: mol_type = other RNA; note = Description of Artificial Sequence: Synthetic oligonucleotide
  modified_base 1: mod_base = OTHER; note = 2'-O-Methylguanosine phosphorothioate
  modified_base 2: mod_base = OTHER; note = 2'-O-Methyluridine phosphorothioate
  modified_base 3: mod_base = OTHER; note = 2'-O-Methylguanosine phosphorothioate
  modified_base 4: mod_base = OTHER; note = 2'-O-Methylguanosine phosphorothioate
  modified_base 5: mod_base = OTHER; note = 2'-O-Methyladenosine
  modified_base 6: mod_base = OTHER; note = 2'-O-Methyladenosine
  modified_base 7: mod_base = OTHER; note = 2'-O-Methyluridine
  modified_base 8: mod_base = OTHER; note = 2'-O-Methyladenosine
  modified_base 9: mod_base = OTHER; note = 2'-O-Methylguanosine
  modified_base 10: mod_base = OTHER; note = 2'-O-Methyluridine
  modified_base 11: mod_base = OTHER; note = 2'-O-Methyladenosine
  modified_base 12: mod_base = OTHER; note = 2'-O-Methyluridine
  modified_base 13: mod_base = OTHER; note = 2'-O-Methyladenosine
  modified_base 14: mod_base = OTHER; note = 2'-O-Methyladenosine
  modified_base 15: mod_base = OTHER; note = 2'-O-Methylcytosine
  modified_base 16: mod_base = OTHER; note = 2'-O-Methyladenosine
  modified_base 17: mod_base = OTHER; note = 2'-O-Methyladenosine
  modified_base 18: mod_base = OTHER; note = 2'-O-Methyluridine
  modified_base 19: mod_base = OTHER; note = 2'-O-Methyladenosine
  modified_base 20: mod_base = OTHER; note = 2'-O-Methyluridine
  modified_base 21: mod_base = OTHER; note = 2'-O-Methylguanosine
  modified_base 22: mod_base = OTHER; note = 2'-O-Methylcytosine
  modified_base 23: mod_base = OTHER; note = 2'-O-Methyluridine
  modified_base 24: mod_base = OTHER; note = 2'-O-Methyladenosine
  modified_base 25: mod_base = OTHER; note = 2'-O-Methyladenosine
  modified_base 26: mod_base = OTHER; note = 2'-O-Methyladenosine
  modified_base 27: mod_base = OTHER; note = 2'-O-Methyluridine
  modified_base 28: mod_base = OTHER; note = 2'-O-Methylguanosine
  modified_base 29: mod_base = OTHER; note = 2'-O-Methyluridine
  modified_base 30: mod_base = OTHER; note = 2'-O-Methyluridine
  modified_base 31: mod_base = OTHER; note = 2'-O-Methylguanosine
  modified_base 32: mod_base = OTHER; note = 2'-O-Methyluridine
  modified_base 33: mod_base = OTHER; note = 2'-O-Methyluridine
  modified_base 34: mod_base = OTHER; note = 2'-O-Methyladenosine
  modified_base 35: mod_base = OTHER; note = 2'-O-Methyluridine
  modified_base 36: mod_base = OTHER; note = 2'-O-Methyladenosine
  modified_base 37: mod_base = OTHER; note = 2'-O-Methylguanosine
  modified_base 38: mod_base = OTHER; note = 2'-O-Methyluridine
  modified_base 39: mod_base = OTHER; note = 2'-O-Methyladenosine
  modified_base 40: mod_base = OTHER; note = 2'-O-Methyluridine
  modified_base 41: mod_base = OTHER; note = 2'-O-Methylcytosine
  modified_base 42: mod_base = OTHER; note = 2'-O-Methylcytosine
  modified_base 43: mod_base = OTHER; note = 2'-O-Methylcytosine
  modified_base 44: mod_base = OTHER; note = 2'-O-Methyladenosine
  modified_base 45: mod_base = OTHER; note = 2'-O-Methylcytosine
  modified_base 46: mod_base = OTHER; note = 2'-O-Methylguanosine
  modified_base 47: mod_base = OTHER; note = 2'-O-Methylcytosine
  modified_base 48: mod_base = OTHER; note = 2'-O-Methyladenosine
  modified_base 49: mod_base = OTHER; note = 2'-O-Methyladenosine
  modified_base 50: mod_base = OTHER; note = 2'-O-Methyluridine
  modified_base 51: mod_base = OTHER; note = 2'-O-Methylguanosine
  modified_base 52: mod_base = OTHER; note = 2'-F-arabinose cytosine
  modified_base 53: mod_base = OTHER; note = 2'-F-arabinose cytosine
  modified_base 54: mod_base = OTHER; note = 2'-F-arabinose guanosine
  modified_base 55: mod_base = OTHER; note = 2'-O-Methyluridine
  modified_base 56: mod_base = OTHER; note = 2'-O-Methyladenosine
  modified_base 57: mod_base = OTHER; note = 2'-O-Methylguanosine
  modified_base 58: mod_base = OTHER; note = 2'-O-Methyluridine
  modified_base 59: mod_base = OTHER; note = 2'-O-Methylcytosine
  modified_base 60: mod_base = OTHER; note = 2'-O-Methyladenosine
  modified_base 61: mod_base = OTHER; note = 2'-O-Methylguanosine
  modified_base 62: mod_base = OTHER; note = 2'-O-Methylcytosine phosphorothioate
  modified_base 63: mod_base = OTHER; note = 2'-O-Methyladenosine phosphorothioate
  modified_base 64: mod_base = OTHER; note = 2'-O-Methyladenosine phosphorothioate
  modified_base 65: mod_base = OTHER; note = 2'-O-Methyluridine phosphorothioate
  modified_base 66: mod_base = OTHER; note = 2'-O-Methylcytosine
gtggaatagtataacaatatgctaaatgttgttatagtatcccacgcaatgccgtagtcagcaatc

SEQ ID NO: 69 - DNA, 50 bp, synthetic construct; identical to SEQ ID NO: 61
  source 1..50: mol_type = other DNA; note = Description of Artificial Sequence: Synthetic oligonucleotide; note = Description of Combined DNA/RNA Molecule: Synthetic oligonucleotide
  modified_base 1: mod_base = OTHER; note = 2'-O-Methyluridine phosphorothioate
  modified_base 2: mod_base = OTHER; note = 2'-O-Methyluridine phosphorothioate
  modified_base 3: mod_base = OTHER; note = 2'-O-Methyluridine phosphorothioate
  modified_base 4: mod_base = OTHER; note = 2'-O-Methyluridine phosphorothioate
  modified_base 5: mod_base = OTHER; note = 2'-O-Methyluridine
  modified_base 6: mod_base = OTHER; note = 2'-O-Methyladenosine
  modified_base 7: mod_base = OTHER; note = 2'-O-Methyluridine
  modified_base 8: mod_base = OTHER; note = 2'-O-Methylcytosine
  modified_base 9: mod_base = OTHER; note = 2'-O-Methylcytosine
  modified_base 10: mod_base = OTHER; note = 2'-O-Methylcytosine
  modified_base 11: mod_base = OTHER; note = 2'-O-Methylcytosine
  modified_base 12: mod_base = OTHER; note = 2'-O-Methyladenosine
  modified_base 13: mod_base = OTHER; note = 2'-O-Methyluridine
  modified_base 14: mod_base = OTHER; note = 2'-O-Methyluridine
  modified_base 15: mod_base = OTHER; note = 2'-O-Methylcytosine
  modified_base 16: mod_base = OTHER; note = 2'-O-Methyluridine
  modified_base 17: mod_base = OTHER; note = 2'-O-Methyladenosine
  modified_base 18: mod_base = OTHER; note = 2'-O-Methylcytosine
  modified_base 19: mod_base = OTHER; note = 2'-O-Methyladenosine
  modified_base 20: mod_base = OTHER; note = 2'-O-Methylguanosine
  modified_base 21: mod_base = OTHER; note = 2'-O-Methylcytosine
  modified_base 22: mod_base = OTHER; note = 2'-O-Methyladenosine
  modified_base 23: mod_base = OTHER; note = 2'-O-Methylguanosine
  modified_base 24: mod_base = OTHER; note = 2'-O-Methyluridine
  modified_base 25: mod_base = OTHER; note = 2'-O-Methyladenosine
  modified_base 26: mod_base = OTHER; note = 2'-O-Methylcytosine
  modified_base 27: mod_base = OTHER; note = 2'-O-Methyluridine
  modified_base 28: mod_base = OTHER; note = 2'-O-Methylguanosine
  modified_base 29: mod_base = OTHER; note = 2'-O-Methyladenosine
  modified_base 30: mod_base = OTHER; note = 2'-O-Methylguanosine
  modified_base 31: mod_base = OTHER; note = 2'-O-Methylcytosine
  modified_base 32: mod_base = OTHER; note = 2'-O-Methyladenosine
  modified_base 33: mod_base = OTHER; note = 2'-O-Methyladenosine
  modified_base 34: mod_base = OTHER; note = 2'-O-Methyluridine
  modified_base 35: mod_base = OTHER; note = 2'-O-Methylguanosine
  modified_base 39: mod_base = OTHER; note = 2'-O-Methyluridine
  modified_base 40: mod_base = OTHER; note = 2'-O-Methyladenosine
  modified_base 41: mod_base = OTHER; note = 2'-O-Methylguanosine
  modified_base 42: mod_base = OTHER; note = 2'-O-Methyluridine
  modified_base 43: mod_base = OTHER; note = 2'-O-Methylcytosine
  modified_base 44: mod_base = OTHER; note = 2'-O-Methyladenosine
  modified_base 45: mod_base = OTHER; note = 2'-O-Methylguanosine
  modified_base 46: mod_base = OTHER; note = 2'-O-Methylcytosine phosphorothioate
  modified_base 47: mod_base = OTHER; note = 2'-O-Methyladenosine phosphorothioate
  modified_base 48: mod_base = OTHER; note = 2'-O-Methyladenosine phosphorothioate
  modified_base 49: mod_base = OTHER; note = 2'-O-Methyluridine phosphorothioate
  modified_base 50: mod_base = OTHER; note = 2'-O-Methylcytosine
  misc_feature 1..35: note = RNA
  misc_feature 36..38: note = DNA
  misc_feature 39..50: note = RNA

SEQ ID NO: 70 - DNA, 50 bp, synthetic construct
  source 1..50: mol_type = other DNA; note = Description of Artificial Sequence: Synthetic oligonucleotide; note = Description of Combined DNA/RNA Molecule: Synthetic oligonucleotide
  modified_base 1: mod_base = OTHER; note = 2'-O-Methyluridine phosphorothioate
  modified_base 2: mod_base = OTHER; note = 2'-O-Methyluridine phosphorothioate
  modified_base 3: mod_base = OTHER; note = 2'-O-Methyluridine phosphorothioate
  modified_base 4: mod_base = OTHER; note = 2'-O-Methyluridine phosphorothioate
  modified_base 5: mod_base = OTHER; note = 2'-O-Methyluridine
  modified_base 6: mod_base = OTHER; note = 2'-O-Methyladenosine
  modified_base 7: mod_base = OTHER; note = 2'-O-Methyluridine
  modified_base 8: mod_base = OTHER; note = 2'-O-Methylcytosine
  modified_base 9: mod_base = OTHER; note = 2'-O-Methylcytosine
  modified_base 10: mod_base = OTHER; note = 2'-O-Methylcytosine
  modified_base 11: mod_base = OTHER; note = 2'-O-Methylcytosine
  modified_base 12: mod_base = OTHER; note = 2'-O-Methyladenosine
  modified_base 13: mod_base = OTHER; note = 2'-O-Methyluridine
  modified_base 14: mod_base = OTHER; note = 2'-O-Methyluridine
  modified_base 15: mod_base = OTHER; note = 2'-O-Methylcytosine
  modified_base 16: mod_base = OTHER; note = 2'-O-Methyluridine
  modified_base 17: mod_base = OTHER; note = 2'-O-Methyladenosine
  modified_base 18: mod_base = OTHER; note = 2'-O-Methylcytosine
  modified_base 19: mod_base = OTHER; note = 2'-O-Methyladenosine
  modified_base 20: mod_base = OTHER; note = 2'-O-Methylguanosine
  modified_base 21: mod_base = OTHER; note = 2'-O-Methylcytosine
  modified_base 22: mod_base = OTHER; note = 2'-O-Methyladenosine
  modified_base 23: mod_base = OTHER; note = 2'-O-Methylguanosine
  modified_base 24: mod_base = OTHER; note = 2'-O-Methyluridine
  modified_base 25: mod_base = OTHER; note = 2'-O-Methyladenosine
  modified_base 26: mod_base = OTHER; note = 2'-O-Methylcytosine
  modified_base 27: mod_base = OTHER; note = 2'-O-Methyluridine
  modified_base 28: mod_base = OTHER; note = 2'-O-Methylguanosine
  modified_base 29: mod_base = OTHER; note = 2'-O-Methyladenosine
  modified_base 30: mod_base = OTHER; note = 2'-O-Methylguanosine
  modified_base 31: mod_base = OTHER; note = 2'-O-Methylcytosine
  modified_base 32: mod_base = OTHER; note = 2'-O-Methyladenosine
  modified_base 33: mod_base = OTHER; note = 2'-O-Methyladenosine
  modified_base 34: mod_base = OTHER; note = 2'-O-Methyluridine
  modified_base 35: mod_base = OTHER; note = 2'-O-Methylguanosine
  modified_base 39: mod_base = OTHER; note = 2'-O-Methyluridine
  modified_base 40: mod_base = OTHER; note = 2'-O-Methyladenosine
  modified_base 41: mod_base = OTHER; note = 2'-O-Methylguanosine
  modified_base 42: mod_base = OTHER; note = 2'-O-Methyluridine
  modified_base 43: mod_base = OTHER; note = 2'-O-Methylcytosine
  modified_base 44: mod_base = OTHER; note = 2'-O-Methyladenosine
  modified_base 45: mod_base = OTHER; note = 2'-O-Methylguanosine
  modified_base 46: mod_base = OTHER; note = 2'-O-Methylcytosine phosphorothioate
  modified_base 47: mod_base = OTHER; note = 2'-O-Methyladenosine phosphorothioate
  modified_base 48: mod_base = OTHER; note = 2'-O-Methyladenosine phosphorothioate
  modified_base 49: mod_base = OTHER; note = 2'-O-Methyluridine phosphorothioate
  modified_base 50: mod_base = OTHER; note = 2'-O-Methylcytosine
  misc_feature 1..35: note = RNA
  misc_feature 36..38: note = DNA
  misc_feature 39..50: note = RNA
tttttatccccattctacagcagtactgagcaatgccatagtcagcaatc

SEQ ID NO: 71 - DNA, 50 bp, synthetic construct; identical to SEQ ID NO: 70
  source 1..50: mol_type = other DNA; note = Description of Artificial Sequence: Synthetic oligonucleotide; note = Description of Combined DNA/RNA Molecule: Synthetic oligonucleotide
  modified_base 1: mod_base = OTHER; note = 2'-O-Methyluridine phosphorothioate
  modified_base 2: mod_base = OTHER; note = 2'-O-Methyluridine phosphorothioate
  modified_base 3: mod_base = OTHER; note = 2'-O-Methyluridine phosphorothioate
  modified_base 4: mod_base = OTHER; note = 2'-O-Methyluridine phosphorothioate
  modified_base 5: mod_base = OTHER; note = 2'-O-Methyluridine
  modified_base 6: mod_base = OTHER; note = 2'-O-Methyladenosine
  modified_base 7: mod_base = OTHER; note = 2'-O-Methyluridine
  modified_base 8: mod_base = OTHER; note = 2'-O-Methylcytosine
  modified_base 9: mod_base = OTHER; note = 2'-O-Methylcytosine
  modified_base 10: mod_base = OTHER; note = 2'-O-Methylcytosine
  modified_base 11: mod_base = OTHER; note = 2'-O-Methylcytosine
  modified_base 12: mod_base = OTHER; note = 2'-O-Methyladenosine
  modified_base 13: mod_base = OTHER; note = 2'-O-Methyluridine
  modified_base 14: mod_base = OTHER; note = 2'-O-Methyluridine
  modified_base 15: mod_base = OTHER; note = 2'-O-Methylcytosine
  modified_base 16: mod_base = OTHER; note = 2'-O-Methyluridine
  modified_base 17: mod_base = OTHER; note = 2'-O-Methyladenosine
  modified_base 18: mod_base = OTHER; note = 2'-O-Methylcytosine
  modified_base 19: mod_base = OTHER; note = 2'-O-Methyladenosine
  modified_base 20: mod_base = OTHER; note = 2'-O-Methylguanosine
  modified_base 21: mod_base = OTHER; note = 2'-O-Methylcytosine
  modified_base 22: mod_base = OTHER; note = 2'-O-Methyladenosine
  modified_base 23: mod_base = OTHER; note = 2'-O-Methylguanosine
  modified_base 24: mod_base = OTHER; note = 2'-O-Methyluridine
  modified_base 25: mod_base = OTHER; note = 2'-O-Methyladenosine
  modified_base 26: mod_base = OTHER; note = 2'-O-Methylcytosine
  modified_base 27: mod_base = OTHER; note = 2'-O-Methyluridine
  modified_base 28: mod_base = OTHER; note = 2'-O-Methylguanosine
  modified_base 29: mod_base = OTHER; note = 2'-O-Methyladenosine
  modified_base 30: mod_base = OTHER; note = 2'-O-Methylguanosine
  modified_base 31: mod_base = OTHER; note = 2'-O-Methylcytosine
  modified_base 32: mod_base = OTHER; note = 2'-O-Methyladenosine
  modified_base 33: mod_base = OTHER; note = 2'-O-Methyladenosine
  modified_base 34: mod_base = OTHER; note = 2'-O-Methyluridine
  modified_base 35: mod_base = OTHER; note = 2'-O-Methylguanosine
  modified_base 36: mod_base = OTHER; note = 2'-F-arabinose cytosine
  modified_base 39: mod_base = OTHER; note = 2'-O-Methyluridine
  modified_base 40: mod_base = OTHER; note = 2'-O-Methyladenosine
  modified_base 41: mod_base = OTHER; note = 2'-O-Methylguanosine
  modified_base 42: mod_base = OTHER; note = 2'-O-Methyluridine
  modified_base 43: mod_base = OTHER; note = 2'-O-Methylcytosine
  modified_base 44: mod_base = OTHER; note = 2'-O-Methyladenosine
  modified_base 45: mod_base = OTHER; note = 2'-O-Methylguanosine
  modified_base 46: mod_base = OTHER; note = 2'-O-Methylcytosine phosphorothioate
  modified_base 47: mod_base = OTHER; note = 2'-O-Methyladenosine phosphorothioate
  modified_base 48: mod_base = OTHER; note = 2'-O-Methyladenosine phosphorothioate
  modified_base 49: mod_base = OTHER; note = 2'-O-Methyluridine phosphorothioate
  modified_base 50: mod_base = OTHER; note = 2'-O-Methylcytosine
  misc_feature 1..36: note = RNA
  misc_feature 37..38: note = DNA
  misc_feature 39..50: note = RNA

SEQ ID NO: 72 - DNA, 50 bp, synthetic construct; identical to SEQ ID NO: 70
  source 1..50: mol_type = other DNA; note = Description of Artificial Sequence: Synthetic oligonucleotide; note = Description of Combined DNA/RNA Molecule: Synthetic oligonucleotide
  modified_base 1: mod_base = OTHER; note = 2'-O-Methyluridine phosphorothioate
  modified_base 2: mod_base = OTHER; note = 2'-O-Methyluridine phosphorothioate
  modified_base 3: mod_base = OTHER; note = 2'-O-Methyluridine phosphorothioate
  modified_base 4: mod_base = OTHER; note = 2'-O-Methyluridine phosphorothioate
  modified_base 5: mod_base = OTHER; note = 2'-O-Methyluridine
  modified_base 6: mod_base = OTHER; note = 2'-O-Methyladenosine
  modified_base 7: mod_base = OTHER; note = 2'-O-Methyluridine
  modified_base 8: mod_base = OTHER; note = 2'-O-Methylcytosine
  modified_base 9: mod_base = OTHER; note = 2'-O-Methylcytosine
  modified_base 10: mod_base = OTHER; note = 2'-O-Methylcytosine
  modified_base 11: mod_base = OTHER; note = 2'-O-Methylcytosine
  modified_base 12: mod_base = OTHER; note = 2'-O-Methyladenosine
  modified_base 13: mod_base = OTHER; note = 2'-O-Methyluridine
  modified_base 14: mod_base = OTHER; note = 2'-O-Methyluridine
  modified_base 15: mod_base = OTHER; note = 2'-O-Methylcytosine
  modified_base 16: mod_base = OTHER; note = 2'-O-Methyluridine
  modified_base 17: mod_base = OTHER; note = 2'-O-Methyladenosine
  modified_base 18: mod_base = OTHER; note = 2'-O-Methylcytosine
  modified_base 19: mod_base = OTHER; note = 2'-O-Methyladenosine
  modified_base 20: mod_base = OTHER; note = 2'-O-Methylguanosine
  modified_base 21: mod_base = OTHER; note = 2'-O-Methylcytosine
  modified_base 22: mod_base = OTHER; note = 2'-O-Methyladenosine
  modified_base 23: mod_base = OTHER; note = 2'-O-Methylguanosine
  modified_base 24: mod_base = OTHER; note = 2'-O-Methyluridine
  modified_base 25: mod_base = OTHER; note = 2'-O-Methyladenosine
  modified_base 26: mod_base = OTHER; note = 2'-O-Methylcytosine
  modified_base 27: mod_base = OTHER; note = 2'-O-Methyluridine
  modified_base 28: mod_base = OTHER; note = 2'-O-Methylguanosine
  modified_base 29: mod_base = OTHER; note = 2'-O-Methyladenosine
  modified_base 30: mod_base = OTHER; note = 2'-O-Methylguanosine
  modified_base 31: mod_base = OTHER; note = 2'-O-Methylcytosine
  modified_base 32: mod_base = OTHER; note = 2'-O-Methyladenosine
  modified_base 33: mod_base = OTHER; note = 2'-O-Methyladenosine
  modified_base 34: mod_base = OTHER; note = 2'-O-Methyluridine
  modified_base 35: mod_base = OTHER; note = 2'-O-Methylguanosine
  modified_base 37: mod_base = OTHER; note = 2'-F-arabinose cytosine
  modified_base 39: mod_base = OTHER; note = 2'-O-Methyluridine
  modified_base 40: mod_base = OTHER; note = 2'-O-Methyladenosine
  modified_base 41: mod_base = OTHER; note = 2'-O-Methylguanosine
  modified_base 42: mod_base = OTHER; note = 2'-O-Methyluridine
  modified_base 43: mod_base = OTHER; note = 2'-O-Methylcytosine
  modified_base 44: mod_base = OTHER; note = 2'-O-Methyladenosine
  modified_base 45: mod_base = OTHER; note = 2'-O-Methylguanosine
  modified_base 46: mod_base = OTHER; note = 2'-O-Methylcytosine phosphorothioate
  modified_base 47: mod_base = OTHER; note = 2'-O-Methyladenosine phosphorothioate
  modified_base 48: mod_base = OTHER; note = 2'-O-Methyladenosine phosphorothioate
  modified_base 49: mod_base = OTHER; note = 2'-O-Methyluridine phosphorothioate
  modified_base 50: mod_base = OTHER; note = 2'-O-Methylcytosine
  misc_feature 1..35: note = RNA
  misc_feature 36: note = DNA
  misc_feature 37: note = RNA
  misc_feature 38: note = DNA
  misc_feature 39..50: note = RNA

SEQ ID NO: 73 - DNA, 50 bp, synthetic construct; identical to SEQ ID NO: 70
  source 1..50: mol_type = other DNA; note = Description of Artificial Sequence: Synthetic oligonucleotide; note = Description of Combined DNA/RNA Molecule: Synthetic oligonucleotide
  modified_base 1: mod_base = OTHER; note = 2'-O-Methyluridine phosphorothioate
  modified_base 2: mod_base = OTHER; note = 2'-O-Methyluridine phosphorothioate
  modified_base 3: mod_base = OTHER; note = 2'-O-Methyluridine phosphorothioate
  modified_base 4: mod_base = OTHER; note = 2'-O-Methyluridine phosphorothioate
  modified_base 5: mod_base = OTHER; note = 2'-O-Methyluridine
  modified_base 6: mod_base = OTHER; note = 2'-O-Methyladenosine
  modified_base 7: mod_base = OTHER; note = 2'-O-Methyluridine
  modified_base 8: mod_base = OTHER; note = 2'-O-Methylcytosine
  modified_base 9: mod_base = OTHER; note = 2'-O-Methylcytosine
  modified_base 10: mod_base = OTHER; note = 2'-O-Methylcytosine
  modified_base 11: mod_base = OTHER; note = 2'-O-Methylcytosine
  modified_base 12: mod_base = OTHER; note = 2'-O-Methyladenosine
  modified_base 13: mod_base = OTHER; note = 2'-O-Methyluridine
  modified_base 14: mod_base = OTHER; note = 2'-O-Methyluridine
  modified_base 15: mod_base = OTHER; note = 2'-O-Methylcytosine
  modified_base 16: mod_base = OTHER; note = 2'-O-Methyluridine
  modified_base 17: mod_base = OTHER; note = 2'-O-Methyladenosine
  modified_base 18: mod_base = OTHER; note = 2'-O-Methylcytosine
  modified_base 19: mod_base = OTHER; note = 2'-O-Methyladenosine
  modified_base 20: mod_base = OTHER; note = 2'-O-Methylguanosine
  modified_base 21: mod_base = OTHER; note = 2'-O-Methylcytosine
  modified_base 22: mod_base = OTHER; note = 2'-O-Methyladenosine
  modified_base 23: mod_base = OTHER; note = 2'-O-Methylguanosine
  modified_base 24: mod_base = OTHER; note = 2'-O-Methyluridine
  modified_base 25: mod_base = OTHER; note = 2'-O-Methyladenosine
  modified_base 26: mod_base = OTHER; note = 2'-O-Methylcytosine
  modified_base 27: mod_base = OTHER; note = 2'-O-Methyluridine
  modified_base 28: mod_base = OTHER; note = 2'-O-Methylguanosine
  modified_base 29: mod_base = OTHER; note = 2'-O-Methyladenosine
  modified_base 30: mod_base = OTHER; note = 2'-O-Methylguanosine
  modified_base 31: mod_base = OTHER; note = 2'-O-Methylcytosine
  modified_base 32: mod_base = OTHER; note = 2'-O-Methyladenosine
  modified_base 33: mod_base = OTHER; note = 2'-O-Methyladenosine
  modified_base 34: mod_base = OTHER; note = 2'-O-Methyluridine
  modified_base 35: mod_base = OTHER; note = 2'-O-Methylguanosine
  modified_base 38: mod_base = OTHER; note = 2'-F-arabinose adenosine
  modified_base 39: mod_base = OTHER; note = 2'-O-Methyluridine
  modified_base 40: mod_base = OTHER; note = 2'-O-Methyladenosine
  modified_base 41: mod_base = OTHER; note = 2'-O-Methylguanosine
  modified_base 42: mod_base = OTHER; note = 2'-O-Methyluridine
  modified_base 43: mod_base = OTHER; note = 2'-O-Methylcytosine
  modified_base 44: mod_base = OTHER; note = 2'-O-Methyladenosine
  modified_base 45: mod_base = OTHER; note = 2'-O-Methylguanosine
  modified_base 46: mod_base = OTHER; note = 2'-O-Methylcytosine phosphorothioate
  modified_base 47: mod_base = OTHER; note = 2'-O-Methyladenosine phosphorothioate
  modified_base 48: mod_base = OTHER; note = 2'-O-Methyladenosine phosphorothioate
  modified_base 49: mod_base = OTHER; note = 2'-O-Methyluridine phosphorothioate
  modified_base 50: mod_base = OTHER; note = 2'-O-Methylcytosine
  misc_feature 1..35: note = RNA
  misc_feature 36..37: note = DNA
  misc_feature 38..50: note = RNA

SEQ ID NO: 74 - DNA, 50 bp, synthetic construct; identical to SEQ ID NO: 70
  source 1..50: mol_type = other DNA; note = Description of Artificial Sequence: Synthetic oligonucleotide; note = Description of Combined DNA/RNA Molecule: Synthetic oligonucleotide
  modified_base 1: mod_base = OTHER; note = 2'-O-Methyluridine phosphorothioate
  modified_base 2: mod_base = OTHER; note = 2'-O-Methyluridine phosphorothioate
  modified_base 3: mod_base = OTHER; note = 2'-O-Methyluridine phosphorothioate
  modified_base 4: mod_base = OTHER; note = 2'-O-Methyluridine phosphorothioate
  modified_base 5: mod_base = OTHER; note = 2'-O-Methyluridine
  modified_base 6: mod_base = OTHER; note = 2'-O-Methyladenosine
  modified_base 7: mod_base = OTHER; note = 2'-O-Methyluridine
  modified_base 8: mod_base = OTHER; note = 2'-O-Methylcytosine
  modified_base 9: mod_base = OTHER; note = 2'-O-Methylcytosine
  modified_base 10: mod_base = OTHER; note = 2'-O-Methylcytosine
  modified_base 11: mod_base = OTHER; note = 2'-O-Methylcytosine
  modified_base 12: mod_base = OTHER; note = 2'-O-Methyladenosine
  modified_base 13: mod_base = OTHER; note = 2'-O-Methyluridine
  modified_base 14: mod_base = OTHER; note = 2'-O-Methyluridine
  modified_base 15: mod_base = OTHER; note = 2'-O-Methylcytosine
  modified_base 16: mod_base = OTHER; note = 2'-O-Methyluridine
  modified_base 17: mod_base = OTHER; note = 2'-O-Methyladenosine
  modified_base 18: mod_base = OTHER; note = 2'-O-Methylcytosine
  modified_base 19: mod_base = OTHER; note = 2'-O-Methyladenosine
  modified_base 20: mod_base = OTHER; note = 2'-O-Methylguanosine
  modified_base 21: mod_base = OTHER; note = 2'-O-Methylcytosine
  modified_base 22: mod_base = OTHER; note = 2'-O-Methyladenosine
  modified_base 23: mod_base = OTHER; note = 2'-O-Methylguanosine
  modified_base 24: mod_base = OTHER; note = 2'-O-Methyluridine
  modified_base 25: mod_base = OTHER; note = 2'-O-Methyladenosine
  modified_base 26: mod_base = OTHER; note = 2'-O-Methylcytosine
  modified_base 27: mod_base = OTHER; note = 2'-O-Methyluridine
  modified_base 28: mod_base = OTHER; note = 2'-O-Methylguanosine
  modified_base 29: mod_base = OTHER; note = 2'-O-Methyladenosine
  modified_base 30: mod_base = OTHER; note = 2'-O-Methylguanosine
  modified_base 31: mod_base = OTHER; note = 2'-O-Methylcytosine
  modified_base 32: mod_base = OTHER; note = 2'-O-Methyladenosine
  modified_base 33: mod_base = OTHER; note = 2'-O-Methyladenosine
  modified_base 34: mod_base = OTHER; note = 2'-O-Methyluridine
  modified_base 35: mod_base = OTHER; note = 2'-O-Methylguanosine
  modified_base 37: mod_base = OTHER; note = 2'-F-arabinose cytosine
  modified_base 38: mod_base = OTHER; note = 2'-F-arabinose adenosine
  modified_base 39: mod_base = OTHER; note = 2'-O-Methyluridine
  modified_base 40: mod_base = OTHER; note = 2'-O-Methyladenosine
  modified_base 41: mod_base = OTHER; note = 2'-O-Methylguanosine
  modified_base 42: mod_base = OTHER; note = 2'-O-Methyluridine
  modified_base 43: mod_base = OTHER; note = 2'-O-Methylcytosine
  modified_base 44: mod_base = OTHER; note = 2'-O-Methyladenosine
  modified_base 45: mod_base = OTHER; note = 2'-O-Methylguanosine
  modified_base 46: mod_base = OTHER; note = 2'-O-Methylcytosine phosphorothioate
  modified_base 47: mod_base = OTHER; note = 2'-O-Methyladenosine phosphorothioate
  modified_base 48: mod_base = OTHER; note = 2'-O-Methyladenosine phosphorothioate
  modified_base 49: mod_base = OTHER; note = 2'-O-Methyluridine phosphorothioate
  modified_base 50: mod_base = OTHER; note = 2'-O-Methylcytosine
  misc_feature 1..35: note = RNA
  misc_feature 36: note = DNA
  misc_feature 37..50: note = RNA

SEQ ID NO: 75 - DNA, 50 bp, synthetic construct; identical to SEQ ID NO: 70
  source 1..50: mol_type = other DNA; note = Description of Artificial Sequence: Synthetic oligonucleotide; note = Description of Combined DNA/RNA Molecule: Synthetic oligonucleotide
  modified_base 1: mod_base = OTHER; note = 2'-O-Methyluridine phosphorothioate
  modified_base 2: mod_base = OTHER; note = 2'-O-Methyluridine phosphorothioate
  modified_base 3: mod_base = OTHER; note = 2'-O-Methyluridine phosphorothioate
  modified_base 4: mod_base = OTHER; note = 2'-O-Methyluridine phosphorothioate
  modified_base 5: mod_base = OTHER; note = 2'-O-Methyluridine
  modified_base 6: mod_base = OTHER; note = 2'-O-Methyladenosine
  modified_base 7: mod_base = OTHER; note = 2'-O-Methyluridine
  modified_base 8: mod_base = OTHER; note = 2'-O-Methylcytosine
  modified_base 9: mod_base = OTHER; note = 2'-O-Methylcytosine
  modified_base 10: mod_base = OTHER; note = 2'-O-Methylcytosine
  modified_base 11: mod_base = OTHER; note = 2'-O-Methylcytosine
  modified_base 12: mod_base = OTHER; note = 2'-O-Methyladenosine
  modified_base 13: mod_base = OTHER; note = 2'-O-Methyluridine
  modified_base 14: mod_base = OTHER; note = 2'-O-Methyluridine
  modified_base 15: mod_base = OTHER; note = 2'-O-Methylcytosine
  modified_base 16: mod_base = OTHER; note = 2'-O-Methyluridine
  modified_base 17: mod_base = OTHER; note = 2'-O-Methyladenosine
  modified_base 18: mod_base = OTHER; note = 2'-O-Methylcytosine
  modified_base 19: mod_base = OTHER; note = 2'-O-Methyladenosine
  modified_base 20: mod_base = OTHER; note = 2'-O-Methylguanosine
  modified_base 21: mod_base = OTHER; note = 2'-O-Methylcytosine
  modified_base 22: mod_base = OTHER; note = 2'-O-Methyladenosine
  modified_base 23: mod_base = OTHER; note = 2'-O-Methylguanosine
  modified_base 24: mod_base = OTHER; note = 2'-O-Methyluridine
  modified_base 25: mod_base = OTHER; note = 2'-O-Methyladenosine
  modified_base 26: mod_base = OTHER; note = 2'-O-Methylcytosine
  modified_base 27: mod_base = OTHER; note = 2'-O-Methyluridine
  modified_base 28: mod_base = OTHER; note = 2'-O-Methylguanosine
  modified_base 29: mod_base = OTHER; note = 2'-O-Methyladenosine
  modified_base 30: mod_base = OTHER; note = 2'-O-Methylguanosine
  modified_base 31: mod_base = OTHER; note = 2'-O-Methylcytosine
  modified_base 32: mod_base = OTHER; note = 2'-O-Methyladenosine
  modified_base 33: mod_base = OTHER; note = 2'-O-Methyladenosine
  modified_base 34: mod_base = OTHER; note = 2'-O-Methyluridine
  modified_base 35: mod_base = OTHER; note = 2'-O-Methylguanosine
  modified_base 36: mod_base = OTHER; note = 2'-F-arabinose cytosine
  modified_base 37: mod_base = OTHER; note = 2'-F-arabinose cytosine
  modified_base 39: mod_base = OTHER; note = 2'-O-Methyluridine
  modified_base 40: mod_base = OTHER; note = 2'-O-Methyladenosine
  modified_base 41: mod_base = OTHER; note = 2'-O-Methylguanosine
  modified_base 42: mod_base = OTHER; note = 2'-O-Methyluridine
  modified_base 43: mod_base = OTHER; note = 2'-O-Methylcytosine
  modified_base 44: mod_base = OTHER; note = 2'-O-Methyladenosine
  modified_base 45: mod_base = OTHER; note = 2'-O-Methylguanosine
  modified_base 46: mod_base = OTHER; note = 2'-O-Methylcytosine phosphorothioate
  modified_base 47: mod_base = OTHER; note = 2'-O-Methyladenosine phosphorothioate
  modified_base 48: mod_base = OTHER; note = 2'-O-Methyladenosine phosphorothioate
  modified_base 49: mod_base = OTHER; note = 2'-O-Methyluridine phosphorothioate
  modified_base 50: mod_base = OTHER; note = 2'-O-Methylcytosine
  misc_feature 1..37: note = RNA
  misc_feature 38: note = DNA
  misc_feature 39..50: note = RNA

SEQ ID NO: 76 - RNA, 50 nt, synthetic construct
  source 1..50: mol_type = other RNA; note = Description of Artificial Sequence: Synthetic oligonucleotide
  modified_base 1: mod_base = OTHER; note = 2'-O-Methyluridine phosphorothioate
  modified_base 2: mod_base = OTHER; note = 2'-O-Methyluridine phosphorothioate
  modified_base 3: mod_base = OTHER; note = 2'-O-Methyluridine phosphorothioate
  modified_base 4: mod_base = OTHER; note = 2'-O-Methyluridine phosphorothioate
  modified_base 5: mod_base = OTHER; note = 2'-O-Methyluridine
  modified_base 6: mod_base = OTHER; note = 2'-O-Methyladenosine
  modified_base 7: mod_base = OTHER; note = 2'-O-Methyluridine
  modified_base 8: mod_base = OTHER; note = 2'-O-Methylcytosine
  modified_base 9: mod_base = OTHER; note = 2'-O-Methylcytosine
  modified_base 10: mod_base = OTHER; note = 2'-O-Methylcytosine
  modified_base 11: mod_base = OTHER; note = 2'-O-Methylcytosine
  modified_base 12: mod_base = OTHER; note = 2'-O-Methyladenosine
  modified_base 13: mod_base = OTHER; note = 2'-O-Methyluridine
  modified_base 14: mod_base = OTHER; note = 2'-O-Methyluridine
  modified_base 15: mod_base = OTHER; note = 2'-O-Methylcytosine
  modified_base 16: mod_base = OTHER; note = 2'-O-Methyluridine
  modified_base 17: mod_base = OTHER; note = 2'-O-Methyladenosine
  modified_base 18: mod_base = OTHER; note = 2'-O-Methylcytosine
  modified_base 19: mod_base = OTHER; note = 2'-O-Methyladenosine
  modified_base 20: mod_base = OTHER; note = 2'-O-Methylguanosine
  modified_base 21: mod_base = OTHER; note = 2'-O-Methylcytosine
  modified_base 22: mod_base = OTHER; note = 2'-O-Methyladenosine
  modified_base 23: mod_base = OTHER; note = 2'-O-Methylguanosine
  modified_base 24: mod_base = OTHER; note = 2'-O-Methyluridine
  modified_base 25: mod_base = OTHER; note = 2'-O-Methyladenosine
  modified_base 26: mod_base = OTHER; note = 2'-O-Methylcytosine
  modified_base 27: mod_base = OTHER; note = 2'-O-Methyluridine
  modified_base 28: mod_base = OTHER; note = 2'-O-Methylguanosine
  modified_base 29: mod_base = OTHER; note = 2'-O-Methyladenosine
  modified_base 30: mod_base = OTHER; note = 2'-O-Methylguanosine
  modified_base 31: mod_base = OTHER; note = 2'-O-Methylcytosine
  modified_base 32: mod_base = OTHER; note = 2'-O-Methyladenosine
  modified_base 33: mod_base = OTHER; note = 2'-O-Methyladenosine
  modified_base 34: mod_base = OTHER; note = 2'-O-Methyluridine
  modified_base 35: mod_base = OTHER; note = 2'-O-Methylguanosine
  modified_base 36: mod_base = OTHER; note = 2'-F-arabinose cytosine
  modified_base 37: mod_base = OTHER; note = 2'-F-arabinose cytosine
  modified_base 38: mod_base = OTHER; note = 2'-F-arabinose adenosine
  modified_base 39: mod_base = OTHER; note = 2'-O-Methyluridine
  modified_base 40: mod_base = OTHER; note = 2'-O-Methyladenosine
  modified_base 41: mod_base = OTHER; note = 2'-O-Methylguanosine
  modified_base 42: mod_base = OTHER; note = 2'-O-Methyluridine
  modified_base 43: mod_base = OTHER; note = 2'-O-Methylcytosine
  modified_base 44: mod_base = OTHER; note = 2'-O-Methyladenosine
  modified_base 45: mod_base = OTHER; note = 2'-O-Methylguanosine
  modified_base 46: mod_base = OTHER; note = 2'-O-Methylcytosine phosphorothioate
  modified_base 47: mod_base = OTHER; note = 2'-O-Methyladenosine phosphorothioate
  modified_base 48: mod_base = OTHER; note = 2'-O-Methyladenosine phosphorothioate
  modified_base 49: mod_base = OTHER; note = 2'-O-Methyluridine phosphorothioate
  modified_base 50: mod_base = OTHER; note = 2'-O-Methylcytosine
tttttatccccattctacagcagtactgagcaatgccatagtcagcaatc

SEQ ID NO: 77 - DNA, 50 bp, synthetic construct; identical to SEQ ID NO: 70
  source 1..50: mol_type = other DNA; note = Description of Artificial Sequence: Synthetic oligonucleotide; note = Description of Combined DNA/RNA Molecule: Synthetic oligonucleotide
  modified_base 1: mod_base = OTHER; note = 2'-O-Methyluridine phosphorothioate
  modified_base 2: mod_base = OTHER; note = 2'-O-Methyluridine phosphorothioate
  modified_base 3: mod_base = OTHER; note = 2'-O-Methyluridine phosphorothioate
  modified_base 4: mod_base = OTHER; note = 2'-O-Methyluridine phosphorothioate
  modified_base 5: mod_base = OTHER; note = 2'-O-Methyluridine
  modified_base 6: mod_base = OTHER; note = 2'-O-Methyladenosine
  modified_base 7: mod_base = OTHER; note = 2'-O-Methyluridine
  modified_base 8: mod_base = OTHER; note = 2'-O-Methylcytosine
  modified_base 9: mod_base = OTHER; note = 2'-O-Methylcytosine
  modified_base 10: mod_base = OTHER; note = 2'-O-Methylcytosine
  modified_base 11: mod_base = OTHER; note = 2'-O-Methylcytosine
  modified_base 12: mod_base = OTHER; note = 2'-O-Methyladenosine
  modified_base 13: mod_base = OTHER; note = 2'-O-Methyluridine
  modified_base 14: mod_base = OTHER; note = 2'-O-Methyluridine
  modified_base 15: mod_base = OTHER; note = 2'-O-Methylcytosine
  modified_base 16: mod_base = OTHER; note = 2'-O-Methyluridine
  modified_base 17: mod_base = OTHER; note = 2'-O-Methyladenosine
  modified_base 18: mod_base = OTHER; note = 2'-O-Methylcytosine
  modified_base 19: mod_base = OTHER; note = 2'-O-Methyladenosine
  modified_base 20: mod_base = OTHER; note = 2'-O-Methylguanosine
  modified_base 21: mod_base = OTHER; note = 2'-O-Methylcytosine
  modified_base 22: mod_base = OTHER; note = 2'-O-Methyladenosine
  modified_base 23: mod_base = OTHER; note = 2'-O-Methylguanosine
  modified_base 24: mod_base = OTHER; note = 2'-O-Methyluridine
  modified_base 25: mod_base = OTHER; note = 2'-O-Methyladenosine
  modified_base 26: mod_base = OTHER; note = 2'-O-Methylcytosine
  modified_base 27: mod_base = OTHER; note = 2'-O-Methyluridine
  modified_base 28: mod_base = OTHER; note = 2'-O-Methylguanosine
  modified_base 29: mod_base = OTHER; note = 2'-O-Methyladenosine
  modified_base 30: mod_base = OTHER; note = 2'-O-Methylguanosine
  modified_base 31: mod_base = OTHER; note = 2'-O-Methylcytosine
  modified_base 32: mod_base = OTHER; note = 2'-O-Methyladenosine
  modified_base 33: mod_base = OTHER; note = 2'-O-Methyladenosine
  modified_base 34: mod_base = OTHER; note = 2'-O-Methyluridine
  modified_base 35: mod_base = OTHER; note = 2'-O-Methylguanosine
  modified_base 36: mod_base = OTHER; note = Cytosone arabinose
  modified_base 39: mod_base = OTHER; note = 2'-O-Methyluridine
  modified_base 40: mod_base = OTHER; note = 2'-O-Methyladenosine
  modified_base 41: mod_base = OTHER; note = 2'-O-Methylguanosine
  modified_base 42: mod_base = OTHER; note = 2'-O-Methyluridine
  modified_base 43: mod_base = OTHER; note = 2'-O-Methylcytosine
  modified_base 44: mod_base = OTHER; note = 2'-O-Methyladenosine
  modified_base 45: mod_base = OTHER; note = 2'-O-Methylguanosine
  modified_base 46: mod_base = OTHER; note = 2'-O-Methylcytosine phosphorothioate
  modified_base 47: mod_base = OTHER; note = 2'-O-Methyladenosine phosphorothioate
  modified_base 48: mod_base = OTHER; note = 2'-O-Methyladenosine phosphorothioate
  modified_base 49: mod_base = OTHER; note = 2'-O-Methyluridine phosphorothioate
  modified_base 50: mod_base = OTHER; note = 2'-O-Methylcytosine
  misc_feature 1..36: note = RNA
  misc_feature 37..38: note = DNA
  misc_feature 39..50: note = RNA

SEQ ID NO: 78 - DNA, 50 bp, synthetic construct; identical to SEQ ID NO: 70
  source 1..50: mol_type = other DNA; note = Description of Artificial Sequence: Synthetic oligonucleotide; note = Description of Combined DNA/RNA Molecule: Synthetic oligonucleotide
  modified_base 1: mod_base = OTHER; note = 2'-O-Methyluridine phosphorothioate
  modified_base 2: mod_base = OTHER; note = 2'-O-Methyluridine phosphorothioate
  modified_base 3: mod_base = OTHER; note = 2'-O-Methyluridine phosphorothioate
  modified_base 4: mod_base = OTHER; note = 2'-O-Methyluridine phosphorothioate
  modified_base 5: mod_base = OTHER; note = 2'-O-Methyluridine
  modified_base 6: mod_base = OTHER; note = 2'-O-Methyladenosine
  modified_base 7: mod_base = OTHER; note = 2'-O-Methyluridine
  modified_base 8: mod_base = OTHER; note = 2'-O-Methylcytosine
  modified_base 9: mod_base = OTHER; note = 2'-O-Methylcytosine
  modified_base 10: mod_base = OTHER; note = 2'-O-Methylcytosine
  modified_base 11: mod_base = OTHER; note = 2'-O-Methylcytosine
  modified_base 12: mod_base = OTHER; note = 2'-O-Methyladenosine
  modified_base 13: mod_base = OTHER; note = 2'-O-Methyluridine
  modified_base 14: mod_base = OTHER; note = 2'-O-Methyluridine
  modified_base 15: mod_base = OTHER; note = 2'-O-Methylcytosine
  modified_base 16: mod_base = OTHER; note = 2'-O-Methyluridine
  modified_base 17: mod_base = OTHER; note = 2'-O-Methyladenosine
  modified_base 18: mod_base = OTHER; note = 2'-O-Methylcytosine
  modified_base 19: mod_base = OTHER; note = 2'-O-Methyladenosine
  modified_base 20: mod_base = OTHER; note = 2'-O-Methylguanosine
  modified_base 21: mod_base = OTHER; note = 2'-O-Methylcytosine
  modified_base 22: mod_base = OTHER; note = 2'-O-Methyladenosine
  modified_base 23: mod_base = OTHER; note = 2'-O-Methylguanosine
  modified_base 24: mod_base = OTHER; note = 2'-O-Methyluridine
  modified_base 25: mod_base = OTHER; note = 2'-O-Methyladenosine
  modified_base 26: mod_base = OTHER; note = 2'-O-Methylcytosine
  modified_base 27: mod_base = OTHER; note = 2'-O-Methyluridine
  modified_base 28: mod_base = OTHER; note = 2'-O-Methylguanosine
  modified_base 29: mod_base = OTHER; note = 2'-O-Methyladenosine
  modified_base 30: mod_base = OTHER; note = 2'-O-Methylguanosine
  modified_base 31: mod_base = OTHER; note = 2'-O-Methylcytosine
  modified_base 32: mod_base = OTHER; note = 2'-O-Methyladenosine
  modified_base 33: mod_base = OTHER; note = 2'-O-Methyladenosine
  modified_base 34: mod_base = OTHER; note = 2'-O-Methyluridine
  modified_base 35: mod_base = OTHER; note = 2'-O-Methylguanosine
  modified_base 37: mod_base = OTHER; note = Cytosone arabinose
  modified_base 39: mod_base = OTHER; note = 2'-O-Methyluridine
  modified_base 40: mod_base = OTHER; note = 2'-O-Methyladenosine
  modified_base 41: mod_base = OTHER; note = 2'-O-Methylguanosine
  modified_base 42: mod_base = OTHER; note = 2'-O-Methyluridine
  modified_base 43: mod_base = OTHER; note = 2'-O-Methylcytosine
  modified_base 44: mod_base = OTHER; note = 2'-O-Methyladenosine
  modified_base 45: mod_base = OTHER; note = 2'-O-Methylguanosine
  modified_base 46: mod_base = OTHER; note = 2'-O-Methylcytosine phosphorothioate
  modified_base 47: mod_base = OTHER; note = 2'-O-Methyladenosine phosphorothioate
  modified_base 48: mod_base = OTHER; note = 2'-O-Methyladenosine phosphorothioate
  modified_base 49: mod_base = OTHER; note = 2'-O-Methyluridine phosphorothioate
  modified_base 50: mod_base = OTHER; note = 2'-O-Methylcytosine
  misc_feature 1..35: note = RNA
  misc_feature 36: note = DNA
  misc_feature 37: note = RNA
  misc_feature 38: note = DNA
  misc_feature 39..50: note = RNA

SEQ ID NO: 79 - DNA, 50 bp, synthetic construct; identical to SEQ ID NO: 70
  source 1..50: mol_type = other DNA; note = Description of Artificial Sequence: Synthetic oligonucleotide; note = Description of Combined DNA/RNA Molecule: Synthetic oligonucleotide
  modified_base 1: mod_base = OTHER; note = 2'-O-Methyluridine phosphorothioate
  modified_base 2: mod_base = OTHER; note = 2'-O-Methyluridine phosphorothioate
  modified_base 3: mod_base = OTHER; note = 2'-O-Methyluridine phosphorothioate
  modified_base 4: mod_base = OTHER; note = 2'-O-Methyluridine phosphorothioate
  modified_base 5: mod_base = OTHER; note = 2'-O-Methyluridine
  modified_base 6: mod_base = OTHER; note = 2'-O-Methyladenosine
  modified_base 7: mod_base = OTHER; note = 2'-O-Methyluridine
  modified_base 8: mod_base = OTHER; note = 2'-O-Methylcytosine
  modified_base 9: mod_base = OTHER; note = 2'-O-Methylcytosine
  modified_base 10: mod_base = OTHER; note = 2'-O-Methylcytosine
  modified_base 11: mod_base = OTHER; note = 2'-O-Methylcytosine
  modified_base 12: mod_base = OTHER; note = 2'-O-Methyladenosine
  modified_base 13: mod_base = OTHER; note = 2'-O-Methyluridine
  modified_base 14: mod_base = OTHER; note = 2'-O-Methyluridine
  modified_base 15: mod_base = OTHER; note = 2'-O-Methylcytosine
  modified_base 16: mod_base = OTHER; note = 2'-O-Methyluridine
  modified_base 17: mod_base = OTHER; note = 2'-O-Methyladenosine
  modified_base 18: mod_base = OTHER; note = 2'-O-Methylcytosine
  modified_base 19: mod_base = OTHER; note = 2'-O-Methyladenosine
  modified_base 20: mod_base = OTHER; note = 2'-O-Methylguanosine
  modified_base 21: mod_base = OTHER; note = 2'-O-Methylcytosine
  modified_base 22: mod_base = OTHER; note = 2'-O-Methyladenosine
  modified_base 23: mod_base = OTHER; note = 2'-O-Methylguanosine
  modified_base 24: mod_base = OTHER; note = 2'-O-Methyluridine
  modified_base 25: mod_base = OTHER; note = 2'-O-Methyladenosine
  modified_base 26: mod_base = OTHER; note = 2'-O-Methylcytosine
  modified_base 27: mod_base = OTHER; note = 2'-O-Methyluridine
  modified_base 28: mod_base = OTHER; note = 2'-O-Methylguanosine
  modified_base 29: mod_base = OTHER; note = 2'-O-Methyladenosine
  modified_base 30: mod_base = OTHER; note = 2'-O-Methylguanosine
  modified_base 31: mod_base = OTHER; note = 2'-O-Methylcytosine
  modified_base 32: mod_base = OTHER; note = 2'-O-Methyladenosine
  modified_base 33: mod_base = OTHER; note = 2'-O-Methyladenosine
  modified_base 34: mod_base = OTHER; note = 2'-O-Methyluridine
  modified_base 35: mod_base = OTHER; note = 2'-O-Methylguanosine
  modified_base 38: mod_base = OTHER; note = Adenosine arabinose
  modified_base 39: mod_base = OTHER; note = 2'-O-Methyluridine
  modified_base 40: mod_base = OTHER; note = 2'-O-Methyladenosine
  modified_base 41: mod_base = OTHER; note = 2'-O-Methylguanosine
  modified_base 42: mod_base = OTHER; note = 2'-O-Methyluridine
  modified_base 43: mod_base = OTHER; note = 2'-O-Methylcytosine
  modified_base 44: mod_base = OTHER; note = 2'-O-Methyladenosine
  modified_base 45: mod_base = OTHER; note = 2'-O-Methylguanosine
  modified_base 46: mod_base = OTHER; note = 2'-O-Methylcytosine phosphorothioate
  modified_base 47: mod_base = OTHER; note = 2'-O-Methyladenosine phosphorothioate
  modified_base 48: mod_base = OTHER; note = 2'-O-Methyladenosine phosphorothioate
  modified_base 49: mod_base = OTHER; note = 2'-O-Methyluridine phosphorothioate
  modified_base 50: mod_base = OTHER; note = 2'-O-Methylcytosine
  misc_feature 1..35: note = RNA
  misc_feature 36..37: note = DNA
  misc_feature 38..50: note = RNA

SEQ ID NO: 80 - RNA, 50 nt, synthetic construct; identical to SEQ ID NO: 76
  source 1..50: mol_type = other RNA; note = Description of Artificial Sequence: Synthetic oligonucleotide
  modified_base 1: mod_base = OTHER; note = 2'-O-Methyluridine phosphorothioate
  modified_base 2: mod_base = OTHER; note = 2'-O-Methyluridine phosphorothioate
  modified_base 3: mod_base = OTHER; note = 2'-O-Methyluridine phosphorothioate
  modified_base 4: mod_base = OTHER; note = 2'-O-Methyluridine phosphorothioate
  modified_base 5: mod_base = OTHER; note = 2'-O-Methyluridine
  modified_base 6: mod_base = OTHER; note = 2'-O-Methyladenosine
  modified_base 7: mod_base = OTHER; note = 2'-O-Methyluridine
  modified_base 8: mod_base = OTHER; note = 2'-O-Methylcytosine
  modified_base 9: mod_base = OTHER; note = 2'-O-Methylcytosine
  modified_base 10: mod_base = OTHER; note = 2'-O-Methylcytosine
  modified_base 11: mod_base = OTHER; note = 2'-O-Methylcytosine
  modified_base 12: mod_base = OTHER; note = 2'-O-Methyladenosine
  modified_base 13: mod_base = OTHER; note = 2'-O-Methyluridine
  modified_base 14: mod_base = OTHER; note = 2'-O-Methyluridine
  modified_base 15: mod_base = OTHER; note = 2'-O-Methylcytosine
  modified_base 16: mod_base = OTHER; note = 2'-O-Methyluridine
  modified_base 17: mod_base = OTHER; note = 2'-O-Methyladenosine
  modified_base 18: mod_base = OTHER; note = 2'-O-Methylcytosine
  modified_base 19: mod_base = OTHER; note = 2'-O-Methyladenosine
  modified_base 20: mod_base = OTHER; note = 2'-O-Methylguanosine
  modified_base 21: mod_base = OTHER; note = 2'-O-Methylcytosine
  modified_base 22: mod_base = OTHER; note = 2'-O-Methyladenosine
  modified_base 23: mod_base = OTHER; note = 2'-O-Methylguanosine
  modified_base 24: mod_base = OTHER; note = 2'-O-Methyluridine
  modified_base 25: mod_base = OTHER; note = 2'-O-Methyladenosine
  modified_base 26: mod_base = OTHER; note = 2'-O-Methylcytosine
  modified_base 27: mod_base = OTHER; note = 2'-O-Methyluridine
  modified_base 28: mod_base = OTHER; note = 2'-O-Methylguanosine
  modified_base 29: mod_base = OTHER; note = 2'-O-Methyladenosine
  modified_base 30: mod_base = OTHER; note = 2'-O-Methylguanosine
  modified_base 31: mod_base = OTHER; note = 2'-O-Methylcytosine
  modified_base 32: mod_base = OTHER; note = 2'-O-Methyladenosine
  modified_base 33: mod_base = OTHER; note = 2'-O-Methyladenosine
  modified_base 34: mod_base = OTHER; note = 2'-O-Methyluridine
  modified_base 35: mod_base = OTHER; note = 2'-O-Methylguanosine
  modified_base 36: mod_base = OTHER; note = Cytosone arabinose
  modified_base 37: mod_base = OTHER; note = Cytosone arabinose
  modified_base 38: mod_base = OTHER; note = Adenosine arabinose
  modified_base 39: mod_base = OTHER; note = 2'-O-Methyluridine
  modified_base 40: mod_base = OTHER; note = 2'-O-Methyladenosine
  modified_base 41: mod_base = OTHER; note = 2'-O-Methylguanosine
  modified_base 42: mod_base = OTHER; note = 2'-O-Methyluridine
  modified_base 43: mod_base = OTHER; note = 2'-O-Methylcytosine
  modified_base 44: mod_base = OTHER; note = 2'-O-Methyladenosine
  modified_base 45: mod_base = OTHER; note = 2'-O-Methylguanosine
  modified_base 46: mod_base = OTHER; note = 2'-O-Methylcytosine phosphorothioate
  modified_base 47: mod_base = OTHER; note = 2'-O-Methyladenosine phosphorothioate
  modified_base 48: mod_base = OTHER; note = 2'-O-Methyladenosine phosphorothioate
  modified_base 49: mod_base = OTHER; note = 2'-O-Methyluridine phosphorothioate
  modified_base 50: mod_base = OTHER; note = 2'-O-Methylcytosine

SEQ ID NO: 81 - DNA, 50 bp, synthetic construct; identical to SEQ ID NO: 70
  source 1..50: mol_type = other DNA; note = Description of Artificial Sequence: Synthetic oligonucleotide; note = Description of Combined DNA/RNA Molecule: Synthetic oligonucleotide
  modified_base 1: mod_base = OTHER; note = 2'-O-Methyluridine phosphorothioate
  modified_base 2: mod_base = OTHER; note = 2'-O-Methyluridine phosphorothioate
  modified_base 3: mod_base = OTHER; note = 2'-O-Methyluridine phosphorothioate
  modified_base 4: mod_base = OTHER; note = 2'-O-Methyluridine phosphorothioate
  modified_base 5: mod_base = OTHER; note = 2'-O-Methyluridine
  modified_base 6: mod_base = OTHER; note = 2'-O-Methyladenosine
  modified_base 7: mod_base = OTHER; note = 2'-O-Methyluridine
  modified_base 8: mod_base = OTHER; note = 2'-O-Methylcytosine
  modified_base 9: mod_base = OTHER; note = 2'-O-Methylcytosine
  modified_base 10: mod_base = OTHER; note = 2'-O-Methylcytosine
  modified_base 11: mod_base = OTHER; note = 2'-O-Methylcytosine
  modified_base 12: mod_base = OTHER; note = 2'-O-Methyladenosine
  modified_base 13: mod_base = OTHER; note = 2'-O-Methyluridine
  modified_base 14: mod_base = OTHER; note = 2'-O-Methyluridine
  modified_base 15: mod_base = OTHER; note = 2'-O-Methylcytosine
  modified_base 16: mod_base = OTHER; note = 2'-O-Methyluridine
  modified_base 17: mod_base = OTHER; note = 2'-O-Methyladenosine
  modified_base 18: mod_base = OTHER; note = 2'-O-Methylcytosine
  modified_base 19: mod_base = OTHER; note = 2'-O-Methyladenosine
  modified_base 20: mod_base = OTHER; note = 2'-O-Methylguanosine
  modified_base 21: mod_base = OTHER; note = 2'-O-Methylcytosine
  modified_base 22: mod_base = OTHER; note = 2'-O-Methyladenosine
  modified_base 23: mod_base = OTHER; note = 2'-O-Methylguanosine
  modified_base 24: mod_base = OTHER; note = 2'-O-Methyluridine
  modified_base 25: mod_base = OTHER; note = 2'-O-Methyladenosine
  modified_base 26: mod_base = OTHER; note = 2'-O-Methylcytosine
  modified_base 27: mod_base = OTHER; note = 2'-O-Methyluridine
  modified_base 28: mod_base = OTHER; note = 2'-O-Methylguanosine
  modified_base 29: mod_base = OTHER; note = 2'-O-Methyladenosine
  modified_base 30: mod_base = OTHER; note = 2'-O-Methylguanosine
  modified_base 31: mod_base = OTHER; note = 2'-O-Methylcytosine
  modified_base 32: mod_base = OTHER; note = 2'-O-Methyladenosine
  modified_base 33: mod_base = OTHER; note = 2'-O-Methyladenosine
  modified_base 34: mod_base = OTHER; note = 2'-O-Methyluridine
  modified_base 35: mod_base = OTHER; note = 2'-O-Methylguanosine
  modified_base 36: mod_base = OTHER; note = 2'-O-Methylcytosine Arabinose
  modified_base 39: mod_base = OTHER; note = 2'-O-Methyluridine
  modified_base 40: mod_base = OTHER; note = 2'-O-Methyladenosine
  modified_base 41: mod_base = OTHER; note = 2'-O-Methylguanosine
  modified_base 42: mod_base = OTHER; note = 2'-O-Methyluridine
  modified_base 43: mod_base = OTHER; note = 2'-O-Methylcytosine
  modified_base 44: mod_base = OTHER; note = 2'-O-Methyladenosine
  modified_base 45: mod_base = OTHER; note = 2'-O-Methylguanosine
  modified_base 46: mod_base = OTHER; note = 2'-O-Methylcytosine phosphorothioate
  modified_base 47: mod_base = OTHER; note = 2'-O-Methyladenosine phosphorothioate
  modified_base 48: mod_base = OTHER; note = 2'-O-Methyladenosine phosphorothioate
  modified_base 49: mod_base = OTHER; note = 2'-O-Methyluridine phosphorothioate
  modified_base 50: mod_base = OTHER; note = 2'-O-Methylcytosine
  misc_feature 1..36: note = RNA
  misc_feature 37..38: note = DNA
  misc_feature 39..50: note = RNA

SEQ ID NO: 82 - DNA, 50 bp, synthetic construct; identical to SEQ ID NO: 70
  source 1..50: mol_type = other DNA; note = Description of Artificial Sequence: Synthetic oligonucleotide; note = Description of Combined DNA/RNA Molecule: Synthetic oligonucleotide
  modified_base 1: mod_base = OTHER; note = 2'-O-Methyluridine phosphorothioate
  modified_base 2: mod_base = OTHER; note = 2'-O-Methyluridine phosphorothioate
  modified_base 3: mod_base = OTHER; note = 2'-O-Methyluridine phosphorothioate
  modified_base 4: mod_base = OTHER; note = 2'-O-Methyluridine phosphorothioate
  modified_base 5: mod_base = OTHER; note = 2'-O-Methyluridine
  modified_base 6: mod_base = OTHER; note = 2'-O-Methyladenosine
  modified_base 7: mod_base = OTHER; note = 2'-O-Methyluridine
  modified_base 8: mod_base = OTHER; note = 2'-O-Methylcytosine
  modified_base 9: mod_base = OTHER; note = 2'-O-Methylcytosine
  modified_base 10: mod_base = OTHER; note = 2'-O-Methylcytosine
  modified_base 11: mod_base = OTHER; note = 2'-O-Methylcytosine
  modified_base 12: mod_base = OTHER; note = 2'-O-Methyladenosine
  modified_base 13: mod_base = OTHER; note = 2'-O-Methyluridine
  modified_base 14: mod_base = OTHER; note = 2'-O-Methyluridine
  modified_base 15: mod_base = OTHER; note = 2'-O-Methylcytosine
  modified_base 16: mod_base = OTHER; note = 2'-O-Methyluridine
  modified_base 17: mod_base = OTHER; note = 2'-O-Methyladenosine
  modified_base 18: mod_base = OTHER; note = 2'-O-Methylcytosine
  modified_base 19: mod_base = OTHER; note = 2'-O-Methyladenosine
  modified_base 20: mod_base = OTHER; note = 2'-O-Methylguanosine
  modified_base 21: mod_base = OTHER; note = 2'-O-Methylcytosine
  modified_base 22: mod_base = OTHER; note = 2'-O-Methyladenosine
  modified_base 23: mod_base = OTHER; note = 2'-O-Methylguanosine
  modified_base 24: mod_base = OTHER; note = 2'-O-Methyluridine
  modified_base 25: mod_base = OTHER; note = 2'-O-Methyladenosine
  modified_base 26: mod_base = OTHER; note = 2'-O-Methylcytosine
  modified_base 27: mod_base = OTHER; note = 2'-O-Methyluridine
  modified_base 28: mod_base = OTHER; note = 2'-O-Methylguanosine
  modified_base 29: mod_base = OTHER; note = 2'-O-Methyladenosine
  modified_base 30: mod_base = OTHER; note = 2'-O-Methylguanosine
  modified_base 31: mod_base = OTHER; note = 2'-O-Methylcytosine
  modified_base 32: mod_base = OTHER; note = 2'-O-Methyladenosine
  modified_base 33: mod_base = OTHER; note = 2'-O-Methyladenosine
  modified_base 34: mod_base = OTHER; note = 2'-O-Methyluridine
  modified_base 35: mod_base = OTHER; note = 2'-O-Methylguanosine
  modified_base 37: mod_base = OTHER; note = 2'-O-Methylcytosine Arabinose
  modified_base 39: mod_base = OTHER; note = 2'-O-Methyluridine
  modified_base 40: mod_base = OTHER; note = 2'-O-Methyladenosine
  modified_base 41: mod_base = OTHER; note = 2'-O-Methylguanosine
  modified_base 42: mod_base = OTHER; note = 2'-O-Methyluridine
  modified_base 43: mod_base = OTHER; note = 2'-O-Methylcytosine
  modified_base 44: mod_base = OTHER; note = 2'-O-Methyladenosine
  modified_base 45: mod_base = OTHER; note = 2'-O-Methylguanosine
  modified_base 46: mod_base = OTHER; note = 2'-O-Methylcytosine phosphorothioate
  modified_base 47: mod_base = OTHER; note = 2'-O-Methyladenosine phosphorothioate
  modified_base 48: mod_base = OTHER; note = 2'-O-Methyladenosine phosphorothioate
  modified_base 49: mod_base = OTHER; note = 2'-O-Methyluridine phosphorothioate
  modified_base 50: mod_base = OTHER; note = 2'-O-Methylcytosine
  misc_feature 1..35: note = RNA
  misc_feature 36: note = DNA
  misc_feature 37: note = RNA
  misc_feature 38: note = DNA
  misc_feature 39..50: note = RNA

SEQ ID NO: 83 - DNA, 50 bp, synthetic construct; identical to SEQ ID NO: 70
  source 1..50: mol_type = other DNA; note = Description of Artificial Sequence: Synthetic oligonucleotide; note = Description of Combined DNA/RNA Molecule: Synthetic oligonucleotide
  modified_base 1: mod_base = OTHER; note = 2'-O-Methyluridine phosphorothioate
  modified_base 2: mod_base = OTHER; note = 2'-O-Methyluridine phosphorothioate
  modified_base 3: mod_base = OTHER; note = 2'-O-Methyluridine phosphorothioate
  modified_base 4: mod_base = OTHER; note = 2'-O-Methyluridine phosphorothioate
  modified_base 5: mod_base = OTHER; note = 2'-O-Methyluridine
  modified_base 6: mod_base = OTHER; note = 2'-O-Methyladenosine
  modified_base 7: mod_base = OTHER; note = 2'-O-Methyluridine
  modified_base 8: mod_base = OTHER; note = 2'-O-Methylcytosine
  modified_base 9: mod_base = OTHER; note = 2'-O-Methylcytosine
  modified_base 10: mod_base = OTHER; note = 2'-O-Methylcytosine
  modified_base 11: mod_base = OTHER; note = 2'-O-Methylcytosine
  modified_base 12: mod_base = OTHER; note = 2'-O-Methyladenosine
  modified_base 13: mod_base = OTHER; note = 2'-O-Methyluridine
  modified_base 14: mod_base = OTHER; note = 2'-O-Methyluridine
  modified_base 15: mod_base = OTHER; note = 2'-O-Methylcytosine
  modified_base 16: mod_base = OTHER; note = 2'-O-Methyluridine
  modified_base 17: mod_base = OTHER; note = 2'-O-Methyladenosine
  modified_base 18: mod_base = OTHER; note = 2'-O-Methylcytosine
  modified_base 19: mod_base = OTHER; note = 2'-O-Methyladenosine
  modified_base 20: mod_base = OTHER; note = 2'-O-Methylguanosine
  modified_base 21: mod_base = OTHER; note = 2'-O-Methylcytosine
  modified_base 22: mod_base = OTHER; note = 2'-O-Methyladenosine
  modified_base 23: mod_base = OTHER; note = 2'-O-Methylguanosine
  modified_base 24: mod_base = OTHER; note = 2'-O-Methyluridine
  modified_base 25: mod_base = OTHER; note = 2'-O-Methyladenosine
  modified_base 26: mod_base = OTHER; note = 2'-O-Methylcytosine
  modified_base 27: mod_base = OTHER; note = 2'-O-Methyluridine
  modified_base 28: mod_base = OTHER; note = 2'-O-Methylguanosine
  modified_base 29: mod_base = OTHER; note = 2'-O-Methyladenosine
  modified_base 30: mod_base = OTHER; note = 2'-O-Methylguanosine
  modified_base 31: mod_base = OTHER; note = 2'-O-Methylcytosine
  modified_base 32: mod_base = OTHER; note = 2'-O-Methyladenosine
  modified_base 33: mod_base = OTHER; note = 2'-O-Methyladenosine
  modified_base 34: mod_base = OTHER; note = 2'-O-Methyluridine
  modified_base 35: mod_base = OTHER; note = 2'-O-Methylguanosine
  modified_base 38: mod_base = OTHER; note = 2'-O-Methyladenosine Arabinose
  modified_base 39: mod_base = OTHER; note = 2'-O-Methyluridine
  modified_base 40: mod_base = OTHER; note = 2'-O-Methyladenosine
  modified_base 41: mod_base = OTHER; note = 2'-O-Methylguanosine
  modified_base 42: mod_base = OTHER; note = 2'-O-Methyluridine
  modified_base 43: mod_base = OTHER; note = 2'-O-Methylcytosine
  modified_base 44: mod_base = OTHER; note = 2'-O-Methyladenosine
  modified_base 45: mod_base = OTHER; note = 2'-O-Methylguanosine
  modified_base 46: mod_base = OTHER; note = 2'-O-Methylcytosine phosphorothioate
  modified_base 47: mod_base = OTHER; note = 2'-O-Methyladenosine phosphorothioate
  modified_base 48: mod_base = OTHER; note = 2'-O-Methyladenosine phosphorothioate
  modified_base 49: mod_base = OTHER; note = 2'-O-Methyluridine phosphorothioate
  modified_base 50: mod_base = OTHER; note = 2'-O-Methylcytosine
  misc_feature 1..35: note = RNA
  misc_feature 36..37: note = DNA
  misc_feature 38..50: note = RNA

SEQ ID NO: 84 - DNA, 50 bp, synthetic construct; identical to SEQ ID NO: 70
  source 1..50: mol_type = other DNA; note = Description of Artificial Sequence: Synthetic oligonucleotide; note = Description of Combined DNA/RNA Molecule: Synthetic oligonucleotide
  modified_base 1: mod_base = OTHER; note = 2'-O-Methyluridine phosphorothioate
  modified_base 2: mod_base = OTHER; note = 2'-O-Methyluridine phosphorothioate
  modified_base 3: mod_base = OTHER; note = 2'-O-Methyluridine phosphorothioate
  modified_base 4: mod_base = OTHER; note = 2'-O-Methyluridine phosphorothioate
  modified_base 5: mod_base = OTHER; note = 2'-O-Methyluridine
  modified_base 6: mod_base = OTHER; note = 2'-O-Methyladenosine
  modified_base 7: mod_base = OTHER; note = 2'-O-Methyluridine
  modified_base 8: mod_base = OTHER; note = 2'-O-Methylcytosine
  modified_base 9: mod_base = OTHER; note = 2'-O-Methylcytosine
  modified_base 10: mod_base = OTHER; note = 2'-O-Methylcytosine
  modified_base 11: mod_base = OTHER; note = 2'-O-Methylcytosine
  modified_base 12: mod_base = OTHER; note = 2'-O-Methyladenosine
  modified_base 13: mod_base = OTHER; note = 2'-O-Methyluridine
  modified_base 14: mod_base = OTHER; note = 2'-O-Methyluridine
  modified_base 15: mod_base = OTHER; note = 2'-O-Methylcytosine
  modified_base 16: mod_base = OTHER; note = 2'-O-Methyluridine
  modified_base 17: mod_base = OTHER; note = 2'-O-Methyladenosine
  modified_base 18: mod_base = OTHER; note = 2'-O-Methylcytosine
  modified_base 19: mod_base = OTHER; note = 2'-O-Methyladenosine
  modified_base 20: mod_base = OTHER; note = 2'-O-Methylguanosine
  modified_base 21: mod_base = OTHER; note = 2'-O-Methylcytosine
  modified_base 22: mod_base = OTHER; note = 2'-O-Methyladenosine
  modified_base 23: mod_base = OTHER; note = 2'-O-Methylguanosine
  modified_base 24: mod_base = OTHER; note = 2'-O-Methyluridine
  modified_base 25: mod_base = OTHER; note = 2'-O-Methyladenosine
  modified_base 26: mod_base = OTHER; note = 2'-O-Methylcytosine
  modified_base 27: mod_base = OTHER; note = 2'-O-Methyluridine
  modified_base 28: mod_base = OTHER; note = 2'-O-Methylguanosine
  modified_base 29: mod_base = OTHER; note = 2'-O-Methyladenosine
  modified_base 30: mod_base = OTHER; note = 2'-O-Methylguanosine
  modified_base 31: mod_base = OTHER; note = 2'-O-Methylcytosine
  modified_base 32: mod_base = OTHER; note = 2'-O-Methyladenosine
  modified_base 33: mod_base = OTHER; note = 2'-O-Methyladenosine
  modified_base 34: mod_base = OTHER; note = 2'-O-Methyluridine
  modified_base 35: mod_base = OTHER; note = 2'-O-Methylguanosine
  modified_base 37: mod_base = OTHER; note = Cystosine alpha-anomer
  modified_base 39: mod_base = OTHER; note = 2'-O-Methyluridine
  modified_base 40: mod_base = OTHER; note = 2'-O-Methyladenosine
  modified_base 41: mod_base = OTHER; note = 2'-O-Methylguanosine
  modified_base 42: mod_base = OTHER; note = 2'-O-Methyluridine
  modified_base 43: mod_base = OTHER; note = 2'-O-Methylcytosine
  modified_base 44: mod_base = OTHER; note = 2'-O-Methyladenosine
  modified_base 45: mod_base = OTHER; note = 2'-O-Methylguanosine
  modified_base 46: mod_base = OTHER; note = 2'-O-Methylcytosine phosphorothioate
  modified_base 47: mod_base = OTHER; note = 2'-O-Methyladenosine phosphorothioate
  modified_base 48: mod_base = OTHER; note = 2'-O-Methyladenosine phosphorothioate
  modified_base 49: mod_base = OTHER; note = 2'-O-Methyluridine phosphorothioate
  modified_base 50: mod_base = OTHER; note = 2'-O-Methylcytosine
  misc_feature 1..35: note = RNA
  misc_feature 36: note = DNA
  misc_feature 37: note = RNA
  misc_feature 38: note = DNA
  misc_feature 39..50: note = RNA

SEQ ID NO: 85 - DNA, 50 bp, synthetic construct
  source 1..50: mol_type = other DNA; note = Description of Artificial Sequence: Synthetic oligonucleotide; note = Description of Combined DNA/RNA Molecule: Synthetic oligonucleotide
  modified_base 1: mod_base = OTHER; note = 2'-O-Methyluridine phosphorothioate
  modified_base 2: mod_base = OTHER; note = 2'-O-Methyluridine phosphorothioate
  modified_base 3: mod_base = OTHER; note = 2'-O-Methyluridine phosphorothioate
  modified_base 4: mod_base = OTHER; note = 2'-O-Methyluridine phosphorothioate
  modified_base 5: mod_base = OTHER; note = 2'-O-Methyluridine
  modified_base 6: mod_base = OTHER; note = 2'-O-Methyladenosine
  modified_base 7: mod_base = OTHER; note = 2'-O-Methyluridine
  modified_base 8: mod_base = OTHER; note = 2'-O-Methylcytosine
  modified_base 9: mod_base = OTHER; note = 2'-O-Methylcytosine
  modified_base 10: mod_base = OTHER; note = 2'-O-Methylcytosine
  modified_base 11: mod_base = OTHER; note = 2'-O-Methylcytosine
  modified_base 12: mod_base = OTHER; note = 2'-O-Methyladenosine
  modified_base 13: mod_base = OTHER; note = 2'-O-Methyluridine
  modified_base 14: mod_base = OTHER; note = 2'-O-Methyluridine
  modified_base 15: mod_base = OTHER; note = 2'-O-Methylcytosine
  modified_base 16: mod_base = OTHER; note = 2'-O-Methyluridine
  modified_base 17: mod_base = OTHER; note = 2'-O-Methyladenosine
  modified_base 18: mod_base = OTHER; note = 2'-O-Methylcytosine
  modified_base 19: mod_base = OTHER; note = 2'-O-Methyladenosine
  modified_base 20: mod_base = OTHER; note = 2'-O-Methylguanosine
  modified_base 21: mod_base = OTHER; note = 2'-O-Methylcytosine
  modified_base 22: mod_base = OTHER; note = 2'-O-Methyladenosine
  modified_base 23: mod_base = OTHER; note = 2'-O-Methylguanosine
  modified_base 24: mod_base = OTHER; note = 2'-O-Methyluridine
  modified_base 25: mod_base = OTHER; note = 2'-O-Methyladenosine
  modified_base 26: mod_base = OTHER; note = 2'-O-Methylcytosine
  modified_base 27: mod_base = OTHER; note = 2'-O-Methyluridine
  modified_base 28: mod_base = OTHER; note = 2'-O-Methylguanosine
  modified_base 29: mod_base = OTHER; note = 2'-O-Methyladenosine
  modified_base 30: mod_base = OTHER; note = 2'-O-Methylguanosine
  modified_base 31: mod_base = OTHER; note = 2'-O-Methylcytosine
  modified_base 32: mod_base = OTHER; note = 2'-O-Methyladenosine
  modified_base 33: mod_base = OTHER; note = 2'-O-Methyladenosine
  modified_base 34: mod_base = OTHER; note = 2'-O-Methyluridine
  modified_base 35: mod_base = OTHER; note = 2'-O-Methylguanosine
  modified_base 37: mod_base = OTHER; note = DNA abasic nucleotide
  modified_base 39: mod_base = OTHER; note = 2'-O-Methyluridine
  modified_base 40: mod_base = OTHER; note = 2'-O-Methyladenosine
  modified_base 41: mod_base = OTHER; note = 2'-O-Methylguanosine
  modified_base 42: mod_base = OTHER; note = 2'-O-Methyluridine
  modified_base 43: mod_base = OTHER; note = 2'-O-Methylcytosine
  modified_base 44: mod_base = OTHER; note = 2'-O-Methyladenosine
  modified_base 45: mod_base = OTHER; note = 2'-O-Methylguanosine
  modified_base 46: mod_base = OTHER; note = 2'-O-Methylcytosine phosphorothioate
  modified_base 47: mod_base = OTHER; note = 2'-O-Methyladenosine phosphorothioate
  modified_base 48: mod_base = OTHER; note = 2'-O-Methyladenosine phosphorothioate
  modified_base 49: mod_base = OTHER; note = 2'-O-Methyluridine phosphorothioate
  modified_base 50: mod_base = OTHER; note = 2'-O-Methylcytosine
  misc_feature 1..35: note = RNA
  misc_feature 36..38: note = DNA
  misc_feature 39..50: note = RNA
tttttatccccattctacagcagtactgagcaatgcnatagtcagcaatc

SEQ ID NO: 86 - DNA, 50 bp, synthetic construct; identical to SEQ ID NO: 85
  source 1..50: mol_type = other DNA; note = Description of Artificial Sequence: Synthetic oligonucleotide; note = Description of Combined DNA/RNA Molecule: Synthetic oligonucleotide
  modified_base 1: mod_base = OTHER; note = 2'-O-Methyluridine phosphorothioate
  modified_base 2: mod_base = OTHER; note = 2'-O-Methyluridine phosphorothioate
  modified_base 3: mod_base = OTHER; note = 2'-O-Methyluridine phosphorothioate
  modified_base 4: mod_base = OTHER; note = 2'-O-Methyluridine phosphorothioate
  modified_base 5: mod_base = OTHER; note = 2'-O-Methyluridine
  modified_base 6: mod_base = OTHER; note = 2'-O-Methyladenosine
  modified_base 7: mod_base = OTHER; note = 2'-O-Methyluridine
  modified_base 8: mod_base = OTHER; note = 2'-O-Methylcytosine
  modified_base 9: mod_base = OTHER; note = 2'-O-Methylcytosine
  modified_base 10: mod_base = OTHER; note = 2'-O-Methylcytosine
  modified_base 11: mod_base = OTHER; note = 2'-O-Methylcytosine
  modified_base 12: mod_base = OTHER; note = 2'-O-Methyladenosine
  modified_base 13: mod_base = OTHER; note = 2'-O-Methyluridine
  modified_base 14: mod_base = OTHER; note = 2'-O-Methyluridine
  modified_base 15: mod_base = OTHER; note = 2'-O-Methylcytosine
  modified_base 16: mod_base = OTHER; note = 2'-O-Methyluridine
  modified_base 17: mod_base = OTHER; note = 2'-O-Methyladenosine
  modified_base 18: mod_base = OTHER; note = 2'-O-Methylcytosine
  modified_base 19: mod_base = OTHER; note = 2'-O-Methyladenosine
  modified_base 20: mod_base = OTHER; note = 2'-O-Methylguanosine
  modified_base 21: mod_base = OTHER; note = 2'-O-Methylcytosine
  modified_base 22: mod_base = OTHER; note = 2'-O-Methyladenosine
  modified_base 23: mod_base = OTHER; note = 2'-O-Methylguanosine
  modified_base 24: mod_base = OTHER; note = 2'-O-Methyluridine
  modified_base 25: mod_base = OTHER; note = 2'-O-Methyladenosine
  modified_base 26: mod_base = OTHER; note = 2'-O-Methylcytosine
  modified_base 27: mod_base = OTHER; note = 2'-O-Methyluridine
  modified_base 28: mod_base = OTHER; note = 2'-O-Methylguanosine
  modified_base 29: mod_base = OTHER; note = 2'-O-Methyladenosine
  modified_base 30: mod_base = OTHER; note = 2'-O-Methylguanosine
  modified_base 31: mod_base = OTHER; note = 2'-O-Methylcytosine
  modified_base 32: mod_base = OTHER; note = 2'-O-Methyladenosine
  modified_base 33: mod_base = OTHER; note = 2'-O-Methyladenosine
  modified_base 34: mod_base = OTHER; note = 2'-O-Methyluridine
  modified_base 35: mod_base = OTHER; note = 2'-O-Methylguanosine
  modified_base 37: mod_base = OTHER; note = RNA abasic nucleotide
  modified_base 39: mod_base = OTHER; note = 2'-O-Methyluridine
  modified_base 40: mod_base = OTHER; note = 2'-O-Methyladenosine
  modified_base 41: mod_base = OTHER; note = 2'-O-Methylguanosine
  modified_base 42: mod_base = OTHER; note = 2'-O-Methyluridine
  modified_base 43: mod_base = OTHER; note = 2'-O-Methylcytosine
  modified_base 44: mod_base = OTHER; note = 2'-O-Methyladenosine
  modified_base 45: mod_base = OTHER; note = 2'-O-Methylguanosine
  modified_base 46: mod_base = OTHER; note = 2'-O-Methylcytosine phosphorothioate
  modified_base 47: mod_base = OTHER; note = 2'-O-Methyladenosine phosphorothioate
  modified_base 48: mod_base = OTHER; note = 2'-O-Methyladenosine phosphorothioate
  modified_base 49: mod_base = OTHER; note = 2'-O-Methyluridine phosphorothioate
  modified_base 50: mod_base = OTHER; note = 2'-O-Methylcytosine
  misc_feature 1..35: note = RNA
  misc_feature 36: note = DNA
  misc_feature 37: note = RNA
  misc_feature 38: note = DNA
  misc_feature 39..50: note = RNA

SEQ ID NO: 87 - DNA, 50 bp, synthetic construct; identical to SEQ ID NO: 85
  source 1..50: mol_type = other DNA; note = Description of Artificial Sequence: Synthetic oligonucleotide; note = Description of Combined DNA/RNA Molecule: Synthetic oligonucleotide
  modified_base 1: mod_base = OTHER; note = 2'-O-Methyluridine phosphorothioate
  modified_base 2: mod_base = OTHER; note = 2'-O-Methyluridine phosphorothioate
  modified_base 3: mod_base = OTHER; note = 2'-O-Methyluridine phosphorothioate
  modified_base 4: mod_base = OTHER; note = 2'-O-Methyluridine phosphorothioate
  modified_base 5: mod_base = OTHER; note = 2'-O-Methyluridine
  modified_base 6: mod_base = OTHER; note = 2'-O-Methyladenosine
  modified_base 7: mod_base = OTHER; note = 2'-O-Methyluridine
  modified_base 8: mod_base = OTHER; note = 2'-O-Methylcytosine
  modified_base 9: mod_base = OTHER; note = 2'-O-Methylcytosine
  modified_base 10: mod_base = OTHER; note = 2'-O-Methylcytosine
  modified_base 11: mod_base = OTHER; note = 2'-O-Methylcytosine
  modified_base 12: mod_base = OTHER; note = 2'-O-Methyladenosine
  modified_base 13: mod_base = OTHER; note = 2'-O-Methyluridine
  modified_base 14: mod_base = OTHER; note = 2'-O-Methyluridine
  modified_base 15: mod_base = OTHER; note = 2'-O-Methylcytosine
  modified_base 16: mod_base = OTHER; note = 2'-O-Methyluridine
  modified_base 17: mod_base = OTHER; note = 2'-O-Methyladenosine
  modified_base 18: mod_base = OTHER; note = 2'-O-Methylcytosine
  modified_base 19: mod_base = OTHER; note = 2'-O-Methyladenosine
  modified_base 20: mod_base = OTHER; note = 2'-O-Methylguanosine
  modified_base 21: mod_base = OTHER; note = 2'-O-Methylcytosine
  modified_base 22: mod_base = OTHER; note = 2'-O-Methyladenosine
  modified_base 23: mod_base = OTHER; note = 2'-O-Methylguanosine
  modified_base 24: mod_base = OTHER; note = 2'-O-Methyluridine
  modified_base 25: mod_base = OTHER; note = 2'-O-Methyladenosine
  modified_base 26: mod_base = OTHER; note = 2'-O-Methylcytosine
  modified_base 27: mod_base = OTHER; note = 2'-O-Methyluridine
  modified_base 28: mod_base = OTHER; note = 2'-O-Methylguanosine
  modified_base 29: mod_base = OTHER; note = 2'-O-Methyladenosine
  modified_base 30: mod_base = OTHER; note = 2'-O-Methylguanosine
  modified_base 31: mod_base = OTHER; note = 2'-O-Methylcytosine
  modified_base 32: mod_base = OTHER; note = 2'-O-Methyladenosine
  modified_base 33: mod_base = OTHER; note = 2'-O-Methyladenosine
  modified_base 34: mod_base = OTHER; note = 2'-O-Methyluridine
  modified_base 35: mod_base = OTHER; note = 2'-O-Methylguanosine
  modified_base 37: mod_base = OTHER; note = 2'-O-Methyl-Abasic nucelotide
  modified_base 39: mod_base = OTHER; note = 2'-O-Methyluridine
  modified_base 40: mod_base = OTHER; note = 2'-O-Methyladenosine
  modified_base 41: mod_base = OTHER; note = 2'-O-Methylguanosine
  modified_base 42: mod_base = OTHER; note = 2'-O-Methyluridine
  modified_base 43: mod_base = OTHER; note = 2'-O-Methylcytosine
  modified_base 44: mod_base = OTHER; note = 2'-O-Methyladenosine
  modified_base 45: mod_base = OTHER; note = 2'-O-Methylguanosine
  modified_base 46: mod_base = OTHER; note = 2'-O-Methylcytosine phosphorothioate
  modified_base 47: mod_base = OTHER; note = 2'-O-Methyladenosine phosphorothioate
  modified_base 48: mod_base = OTHER; note = 2'-O-Methyladenosine phosphorothioate
  modified_base 49: mod_base = OTHER; note = 2'-O-Methyluridine phosphorothioate
  modified_base 50: mod_base = OTHER; note = 2'-O-Methylcytosine
  misc_feature 1..35: note = RNA
  misc_feature 36: note = DNA
  misc_feature 37: note = RNA
  misc_feature 38: note = DNA
  misc_feature 39..50: note = RNA

SEQ ID NO: 88 - DNA, 50 bp, synthetic construct; identical to SEQ ID NO: 70
  source 1..50: mol_type = other DNA; note = Description of Artificial Sequence: Synthetic oligonucleotide; note = Description of Combined DNA/RNA Molecule: Synthetic oligonucleotide
  modified_base 1: mod_base = OTHER; note = 2'-O-Methyluridine phosphorothioate
  modified_base 2: mod_base = OTHER; note = 2'-O-Methyluridine phosphorothioate
  modified_base 3: mod_base = OTHER; note = 2'-O-Methyluridine phosphorothioate
  modified_base 4: mod_base = OTHER; note = 2'-O-Methyluridine phosphorothioate
  modified_base 5: mod_base = OTHER; note = 2'-O-Methyluridine
  modified_base 6: mod_base = OTHER; note = 2'-O-Methyladenosine
  modified_base 7: mod_base = OTHER; note = 2'-O-Methyluridine
  modified_base 8: mod_base = OTHER; note = 2'-O-Methylcytosine
  modified_base 9: mod_base = OTHER; note = 2'-O-Methylcytosine
  modified_base 10: mod_base = OTHER; note = 2'-O-Methylcytosine
  modified_base 11: mod_base = OTHER; note = 2'-O-Methylcytosine
  modified_base 12: mod_base = OTHER; note = 2'-O-Methyladenosine
  modified_base 13: mod_base = OTHER; note = 2'-O-Methyluridine
  modified_base 14: mod_base = OTHER; note = 2'-O-Methyluridine
  modified_base 15: mod_base = OTHER; note = 2'-O-Methylcytosine
  modified_base 16: mod_base = OTHER; note = 2'-O-Methyluridine
  modified_base 17: mod_base = OTHER; note = 2'-O-Methyladenosine
  modified_base 18: mod_base = OTHER; note = 2'-O-Methylcytosine
  modified_base 19: mod_base = OTHER; note = 2'-O-Methyladenosine
  modified_base 20: mod_base = OTHER; note = 2'-O-Methylguanosine
  modified_base 21: mod_base = OTHER; note = 2'-O-Methylcytosine
  modified_base 22: mod_base = OTHER; note = 2'-O-Methyladenosine
  modified_base 23: mod_base = OTHER; note = 2'-O-Methylguanosine
  modified_base 24: mod_base = OTHER; note = 2'-O-Methyluridine
  modified_base 25: mod_base = OTHER; note = 2'-O-Methyladenosine
  modified_base 26: mod_base = OTHER; note = 2'-O-Methylcytosine
  modified_base 27: mod_base = OTHER; note = 2'-O-Methyluridine
  modified_base 28: mod_base = OTHER; note = 2'-O-Methylguanosine
  modified_base 29: mod_base = OTHER; note = 2'-O-Methyladenosine
  modified_base 30: mod_base = OTHER; note = 2'-O-Methylguanosine
  modified_base 31: mod_base = OTHER; note = 2'-O-Methylcytosine
  modified_base 32: mod_base = OTHER; note = 2'-O-Methyladenosine
  modified_base 33: mod_base = OTHER; note = 2'-O-Methyladenosine
  modified_base 34: mod_base = OTHER; note = 2'-O-Methyluridine
  modified_base 35: mod_base = OTHER; note = 2'-O-Methylguanosine
  modified_base 36: mod_base = OTHER; note = Cytosine (S)-Glycol Nucleic Acid (S-GNA)
  modified_base 39: mod_base = OTHER; note = 2'-O-Methyluridine
  modified_base 40: mod_base = OTHER; note = 2'-O-Methyladenosine
  modified_base 41: mod_base = OTHER; note = 2'-O-Methylguanosine
  modified_base 42: mod_base = OTHER; note = 2'-O-Methyluridine
  modified_base 43: mod_base = OTHER; note = 2'-O-Methylcytosine
  modified_base 44: mod_base = OTHER; note = 2'-O-Methyladenosine
  modified_base 45: mod_base = OTHER; note = 2'-O-Methylguanosine
  modified_base 46: mod_base = OTHER; note = 2'-O-Methylcytosine phosphorothioate
  modified_base 47: mod_base = OTHER; note = 2'-O-Methyladenosine phosphorothioate
  modified_base 48: mod_base = OTHER; note = 2'-O-Methyladenosine phosphorothioate
  modified_base 49: mod_base = OTHER; note = 2'-O-Methyluridine phosphorothioate
  modified_base 50: mod_base = OTHER; note = 2'-O-Methylcytosine
  misc_feature 1..36: note = RNA
  misc_feature 37..38: note = DNA
  misc_feature 39..50: note = RNA

SEQ ID NO: 89 - DNA, 50 bp, synthetic construct; identical to SEQ ID NO: 70
  source 1..50: mol_type = other DNA; note = Description of Artificial Sequence: Synthetic oligonucleotide; note = Description of Combined DNA/RNA Molecule: Synthetic oligonucleotide
  modified_base 1: mod_base = OTHER; note = 2'-O-Methyluridine phosphorothioate
  modified_base 2: mod_base = OTHER; note = 2'-O-Methyluridine phosphorothioate
  modified_base 3: mod_base = OTHER; note = 2'-O-Methyluridine phosphorothioate
  modified_base 4: mod_base = OTHER; note = 2'-O-Methyluridine phosphorothioate
  modified_base 5: mod_base = OTHER; note = 2'-O-Methyluridine
  modified_base 6: mod_base = OTHER; note = 2'-O-Methyladenosine
  modified_base 7: mod_base = OTHER; note = 2'-O-Methyluridine
  modified_base 8: mod_base = OTHER; note = 2'-O-Methylcytosine
  modified_base 9: mod_base = OTHER; note = 2'-O-Methylcytosine
  modified_base 10: mod_base = OTHER; note = 2'-O-Methylcytosine
  modified_base 11: mod_base = OTHER; note = 2'-O-Methylcytosine
  modified_base 12: mod_base = OTHER; note = 2'-O-Methyladenosine
  modified_base 13: mod_base = OTHER; note = 2'-O-Methyluridine
  modified_base 14: mod_base = OTHER; note = 2'-O-Methyluridine
  modified_base 15: mod_base = OTHER; note = 2'-O-Methylcytosine
  modified_base 16: mod_base = OTHER; note = 2'-O-Methyluridine
  modified_base 17: mod_base = OTHER; note = 2'-O-Methyladenosine
  modified_base 18: mod_base = OTHER; note = 2'-O-Methylcytosine
  modified_base 19: mod_base = OTHER; note = 2'-O-Methyladenosine
  modified_base 20: mod_base = OTHER; note = 2'-O-Methylguanosine
  modified_base 21: mod_base = OTHER; note = 2'-O-Methylcytosine
  modified_base 22: mod_base = OTHER; note = 2'-O-Methyladenosine
  modified_base 23: mod_base = OTHER; note = 2'-O-Methylguanosine
  modified_base 24: mod_base = OTHER; note = 2'-O-Methyluridine
  modified_base 25: mod_base = OTHER; note = 2'-O-Methyladenosine
  modified_base 26: mod_base = OTHER; note = 2'-O-Methylcytosine
  modified_base 27: mod_base = OTHER; note = 2'-O-Methyluridine
  modified_base 28: mod_base = OTHER; note = 2'-O-Methylguanosine
  modified_base 29: mod_base = OTHER; note = 2'-O-Methyladenosine
  modified_base 30: mod_base = OTHER; note = 2'-O-Methylguanosine
  modified_base 31: mod_base = OTHER; note = 2'-O-Methylcytosine
  modified_base 32: mod_base = OTHER; note = 2'-O-Methyladenosine
  modified_base 33: mod_base = OTHER; note = 2'-O-Methyladenosine
  modified_base 34: mod_base = OTHER; note = 2'-O-Methyluridine
  modified_base 35: mod_base = OTHER; note = 2'-O-Methylguanosine
  modified_base 37: mod_base = OTHER; note = Cytosine (S)-Glycol Nucleic Acid (S-GNA)
  modified_base 39: mod_base = OTHER; note = 2'-O-Methyluridine
  modified_base 40: mod_base = OTHER; note = 2'-O-Methyladenosine
  modified_base 41: mod_base = OTHER; note = 2'-O-Methylguanosine
  modified_base 42: mod_base = OTHER; note = 2'-O-Methyluridine
  modified_base 43: mod_base = OTHER; note = 2'-O-Methylcytosine
  modified_base 44: mod_base = OTHER; note = 2'-O-Methyladenosine
  modified_base 45: mod_base = OTHER; note = 2'-O-Methylguanosine
  modified_base 46: mod_base = OTHER; note = 2'-O-Methylcytosine phosphorothioate
  modified_base 47: mod_base = OTHER; note = 2'-O-Methyladenosine phosphorothioate
  modified_base 48: mod_base = OTHER; note = 2'-O-Methyladenosine phosphorothioate
  modified_base 49: mod_base = OTHER; note = 2'-O-Methyluridine phosphorothioate
  modified_base 50: mod_base = OTHER; note = 2'-O-Methylcytosine
  misc_feature 1..35: note = RNA
  misc_feature 36: note = DNA
  misc_feature 37: note = RNA
  misc_feature 38: note = DNA
  misc_feature 39..50: note = RNA

SEQ ID NO: 90 - DNA, 50 bp, synthetic construct; identical to SEQ ID NO: 70
  source 1..50: mol_type = other DNA; note = Description of Artificial Sequence: Synthetic oligonucleotide; note = Description of Combined DNA/RNA Molecule: Synthetic oligonucleotide
  modified_base 1: mod_base = OTHER; note = 2'-O-Methyluridine phosphorothioate
  modified_base 2: mod_base = OTHER; note = 2'-O-Methyluridine phosphorothioate
  modified_base 3: mod_base = OTHER; note = 2'-O-Methyluridine phosphorothioate
  modified_base 4: mod_base = OTHER; note = 2'-O-Methyluridine phosphorothioate
  modified_base 5: mod_base = OTHER; note = 2'-O-Methyluridine
  modified_base 6: mod_base = OTHER; note = 2'-O-Methyladenosine
  modified_base 7: mod_base = OTHER; note = 2'-O-Methyluridine
  modified_base 8: mod_base = OTHER; note = 2'-O-Methylcytosine
  modified_base 9: mod_base = OTHER; note = 2'-O-Methylcytosine
  modified_base 10: mod_base = OTHER; note = 2'-O-Methylcytosine
  modified_base 11: mod_base = OTHER; note = 2'-O-Methylcytosine
  modified_base 12: mod_base = OTHER; note = 2'-O-Methyladenosine
  modified_base 13: mod_base = OTHER; note = 2'-O-Methyluridine
  modified_base 14: mod_base = OTHER; note = 2'-O-Methyluridine
  modified_base 15: mod_base = OTHER; note = 2'-O-Methylcytosine
  modified_base 16: mod_base = OTHER; note = 2'-O-Methyluridine
  modified_base 17: mod_base = OTHER; note = 2'-O-Methyladenosine
  modified_base 18: mod_base = OTHER; note = 2'-O-Methylcytosine
  modified_base 19: mod_base = OTHER; note = 2'-O-Methyladenosine
  modified_base 20: mod_base = OTHER; note = 2'-O-Methylguanosine
  modified_base 21: mod_base = OTHER; note = 2'-O-Methylcytosine
  modified_base 22: mod_base = OTHER; note = 2'-O-Methyladenosine
  modified_base 23: mod_base = OTHER; note = 2'-O-Methylguanosine
  modified_base 24: mod_base = OTHER; note = 2'-O-Methyluridine
  modified_base 25: mod_base = OTHER; note = 2'-O-Methyladenosine
  modified_base 26: mod_base = OTHER; note = 2'-O-Methylcytosine
  modified_base 27: mod_base = OTHER; note = 2'-O-Methyluridine
  modified_base 28: mod_base = OTHER; note = 2'-O-Methylguanosine
  modified_base 29: mod_base = OTHER; note = 2'-O-Methyladenosine
  modified_base 30: mod_base = OTHER; note = 2'-O-Methylguanosine
  modified_base 31: mod_base = OTHER; note = 2'-O-Methylcytosine
  modified_base 32: mod_base = OTHER; note = 2'-O-Methyladenosine
  modified_base 33: mod_base = OTHER; note = 2'-O-Methyladenosine
  modified_base 34: mod_base = OTHER; note = 2'-O-Methyluridine
  modified_base 35: mod_base = OTHER; note = 2'-O-Methylguanosine
  modified_base 36: mod_base = OTHER; note = Cytosine (S)-Glycol Nucleic Acid (S-GNA)
  modified_base 37: mod_base = OTHER; note = Cytosine (S)-Glycol Nucleic Acid (S-GNA)
  modified_base 39: mod_base = OTHER; note = 2'-O-Methyluridine
  modified_base 40: mod_base = OTHER; note = 2'-O-Methyladenosine
  modified_base 41: mod_base = OTHER; note = 2'-O-Methylguanosine
  modified_base 42: mod_base = OTHER; note = 2'-O-Methyluridine
  modified_base 43: mod_base = OTHER; note = 2'-O-Methylcytosine
  modified_base 44: mod_base = OTHER; note = 2'-O-Methyladenosine
  modified_base 45: mod_base = OTHER; note = 2'-O-Methylguanosine
  modified_base 46: mod_base = OTHER; note = 2'-O-Methylcytosine phosphorothioate
  modified_base 47: mod_base = OTHER; note = 2'-O-Methyladenosine phosphorothioate
  modified_base 48: mod_base = OTHER; note = 2'-O-Methyladenosine phosphorothioate
  modified_base 49: mod_base = OTHER; note = 2'-O-Methyluridine phosphorothioate
  modified_base 50: mod_base = OTHER; note = 2'-O-Methylcytosine
  misc_feature 1..37: note = RNA
  misc_feature 38: note = DNA
  misc_feature 39..50: note = RNA

SEQ ID NO: 91 - DNA, 50 bp, synthetic construct; identical to SEQ ID NO: 70
  source 1..50: mol_type = other DNA; note = Description of Artificial Sequence: Synthetic oligonucleotide; note = Description of Combined DNA/RNA Molecule: Synthetic oligonucleotide
  modified_base 1: mod_base = OTHER; note = 2'-O-Methyluridine phosphorothioate
  modified_base 2: mod_base = OTHER; note = 2'-O-Methyluridine phosphorothioate
  modified_base 3: mod_base = OTHER; note = 2'-O-Methyluridine phosphorothioate
  modified_base 4: mod_base = OTHER; note = 2'-O-Methyluridine phosphorothioate
  modified_base 5: mod_base = OTHER; note = 2'-O-Methyluridine
  modified_base 6: mod_base = OTHER; note = 2'-O-Methyladenosine
  modified_base 7: mod_base = OTHER; note = 2'-O-Methyluridine
  modified_base 8: mod_base = OTHER; note = 2'-O-Methylcytosine
  modified_base 9: mod_base = OTHER; note = 2'-O-Methylcytosine
  modified_base 10: mod_base = OTHER; note = 2'-O-Methylcytosine
  modified_base 11: mod_base = OTHER; note = 2'-O-Methylcytosine
  modified_base 12: mod_base = OTHER; note = 2'-O-Methyladenosine
  modified_base 13: mod_base = OTHER; note = 2'-O-Methyluridine
  modified_base 14: mod_base = OTHER; note = 2'-O-Methyluridine
  modified_base 15: mod_base = OTHER; note = 2'-O-Methylcytosine
  modified_base 16: mod_base = OTHER; note = 2'-O-Methyluridine
  modified_base 17: mod_base = OTHER; note = 2'-O-Methyladenosine
  modified_base 18: mod_base = OTHER; note = 2'-O-Methylcytosine
  modified_base 19: mod_base = OTHER; note = 2'-O-Methyladenosine
  modified_base 20: mod_base = OTHER; note = 2'-O-Methylguanosine
  modified_base 21: mod_base = OTHER; note = 2'-O-Methylcytosine
  modified_base 22: mod_base = OTHER; note = 2'-O-Methyladenosine
  modified_base 23: mod_base = OTHER; note = 2'-O-Methylguanosine
  modified_base 24: mod_base = OTHER; note = 2'-O-Methyluridine
  modified_base 25: mod_base = OTHER; note = 2'-O-Methyladenosine
  modified_base 26: mod_base = OTHER; note = 2'-O-Methylcytosine
  modified_base 27: mod_base = OTHER; note = 2'-O-Methyluridine
  modified_base 28: mod_base = OTHER; note = 2'-O-Methylguanosine
  modified_base 29: mod_base = OTHER; note = 2'-O-Methyladenosine
  modified_base 30: mod_base = OTHER; note = 2'-O-Methylguanosine
  modified_base 31: mod_base = OTHER; note = 2'-O-Methylcytosine
  modified_base 32: mod_base = OTHER; note = 2'-O-Methyladenosine
  modified_base 33: mod_base = OTHER; note = 2'-O-Methyladenosine
  modified_base 34: mod_base = OTHER; note = 2'-O-Methyluridine
  modified_base 35: mod_base = OTHER; note = 2'-O-Methylguanosine
  modified_base 36: mod_base = OTHER; note = Cytosine (R)-Glycol Nucleic Acid (R-GNA)
  modified_base 39: mod_base = OTHER; note = 2'-O-Methyluridine
  modified_base 40: mod_base = OTHER; note = 2'-O-Methyladenosine
  modified_base 41: mod_base = OTHER; note = 2'-O-Methylguanosine
  modified_base 42: mod_base = OTHER; note = 2'-O-Methyluridine
  modified_base 43: mod_base = OTHER; note = 2'-O-Methylcytosine
  modified_base 44: mod_base = OTHER; note = 2'-O-Methyladenosine
  modified_base 45: mod_base = OTHER; note = 2'-O-Methylguanosine
  modified_base 46: mod_base = OTHER; note = 2'-O-Methylcytosine phosphorothioate
  modified_base 47: mod_base = OTHER; note = 2'-O-Methyladenosine phosphorothioate
  modified_base 48: mod_base = OTHER; note = 2'-O-Methyladenosine phosphorothioate
  modified_base 49: mod_base = OTHER; note = 2'-O-Methyluridine phosphorothioate
  modified_base 50: mod_base = OTHER; note = 2'-O-Methylcytosine
  misc_feature 1..36: note = RNA
  misc_feature 37..38: note = DNA
  misc_feature 39..50: note = RNA

SEQ ID NO: 92 - DNA, 50 bp, synthetic construct; identical to SEQ ID NO: 70
  source 1..50: mol_type = other DNA; note = Description of Artificial Sequence: Synthetic oligonucleotide; note = Description of Combined DNA/RNA Molecule: Synthetic oligonucleotide
  modified_base 1: mod_base = OTHER; note = 2'-O-Methyluridine phosphorothioate
  modified_base 2: mod_base = OTHER; note = 2'-O-Methyluridine phosphorothioate
  modified_base 3: mod_base = OTHER; note = 2'-O-Methyluridine phosphorothioate
  modified_base 4: mod_base = OTHER; note = 2'-O-Methyluridine phosphorothioate
  modified_base 5: mod_base = OTHER; note = 2'-O-Methyluridine
  modified_base 6: mod_base = OTHER; note = 2'-O-Methyladenosine
  modified_base 7: mod_base = OTHER; note = 2'-O-Methyluridine
  modified_base 8: mod_base = OTHER; note = 2'-O-Methylcytosine
  modified_base 9: mod_base = OTHER; note = 2'-O-Methylcytosine
  modified_base 10: mod_base = OTHER; note = 2'-O-Methylcytosine
  modified_base 11: mod_base = OTHER; note = 2'-O-Methylcytosine
  modified_base 12: mod_base = OTHER; note = 2'-O-Methyladenosine
  modified_base 13: mod_base = OTHER; note = 2'-O-Methyluridine
  modified_base 14: mod_base = OTHER; note = 2'-O-Methyluridine
  modified_base 15: mod_base = OTHER; note = 2'-O-Methylcytosine
  modified_base 16: mod_base = OTHER; note = 2'-O-Methyluridine
  modified_base 17: mod_base = OTHER; note = 2'-O-Methyladenosine
  modified_base 18: mod_base = OTHER; note = 2'-O-Methylcytosine
  modified_base 19: mod_base = OTHER; note = 2'-O-Methyladenosine
  modified_base 20: mod_base = OTHER; note = 2'-O-Methylguanosine
  modified_base 21: mod_base = OTHER; note = 2'-O-Methylcytosine
  modified_base 22: mod_base = OTHER; note = 2'-O-Methyladenosine
  modified_base 23: mod_base = OTHER; note = 2'-O-Methylguanosine
  modified_base 24: mod_base = OTHER; note = 2'-O-Methyluridine
  modified_base 25: mod_base = OTHER; note = 2'-O-Methyladenosine
  modified_base 26: mod_base = OTHER; note = 2'-O-Methylcytosine
  modified_base 27: mod_base = OTHER; note = 2'-O-Methyluridine
  modified_base 28: mod_base = OTHER; note = 2'-O-Methylguanosine
  modified_base 29: mod_base = OTHER; note = 2'-O-Methyladenosine
  modified_base 30: mod_base = OTHER; note = 2'-O-Methylguanosine
  modified_base 31: mod_base = OTHER; note = 2'-O-Methylcytosine
  modified_base 32: mod_base = OTHER; note = 2'-O-Methyladenosine
  modified_base 33: mod_base = OTHER; note = 2'-O-Methyladenosine
  modified_base 34: mod_base = OTHER; note = 2'-O-Methyluridine
  modified_base 35: mod_base = OTHER; note = 2'-O-Methylguanosine
  modified_base 37: mod_base = OTHER; note = Cytosine (R)-Glycol Nucleic Acid (R-GNA)
  modified_base 39: mod_base = OTHER; note = 2'-O-Methyluridine
  modified_base 40: mod_base = OTHER; note = 2'-O-Methyladenosine
  modified_base 41: mod_base = OTHER; note = 2'-O-Methylguanosine
  modified_base 42: mod_base = OTHER; note = 2'-O-Methyluridine
  modified_base 43: mod_base = OTHER; note = 2'-O-Methylcytosine
  modified_base 44: mod_base = OTHER; note = 2'-O-Methyladenosine
  modified_base 45: mod_base = OTHER; note = 2'-O-Methylguanosine
  modified_base 46: mod_base = OTHER; note = 2'-O-Methylcytosine phosphorothioate
  modified_base 47: mod_base = OTHER; note = 2'-O-Methyladenosine phosphorothioate
  modified_base 48: mod_base = OTHER; note = 2'-O-Methyladenosine phosphorothioate
  modified_base 49: mod_base = OTHER; note = 2'-O-Methyluridine phosphorothioate
  modified_base 50: mod_base = OTHER; note = 2'-O-Methylcytosine
  misc_feature 1..35: note = RNA
  misc_feature 36: note = DNA
  misc_feature 37: note = RNA
  misc_feature 38: note = DNA
  misc_feature 39..50: note = RNA

SEQ ID NO: 93 - DNA, 50 bp, synthetic construct; identical to SEQ ID NO: 70
  source 1..50: mol_type = other DNA; note = Description of Artificial Sequence: Synthetic oligonucleotide; note = Description of Combined DNA/RNA Molecule: Synthetic oligonucleotide
  modified_base 1: mod_base = OTHER; note = 2'-O-Methyluridine phosphorothioate
  modified_base 2: mod_base = OTHER; note = 2'-O-Methyluridine phosphorothioate
  modified_base 3: mod_base = OTHER; note = 2'-O-Methyluridine phosphorothioate
  modified_base 4: mod_base = OTHER; note = 2'-O-Methyluridine phosphorothioate
  modified_base 5: mod_base = OTHER; note = 2'-O-Methyluridine
  modified_base 6: mod_base = OTHER; note = 2'-O-Methyladenosine
  modified_base 7: mod_base = OTHER; note = 2'-O-Methyluridine
  modified_base 8: mod_base = OTHER; note = 2'-O-Methylcytosine
  modified_base 9: mod_base = OTHER; note = 2'-O-Methylcytosine
  modified_base 10: mod_base = OTHER; note = 2'-O-Methylcytosine
  modified_base 11: mod_base = OTHER; note = 2'-O-Methylcytosine
  modified_base 12: mod_base = OTHER; note = 2'-O-Methyladenosine
  modified_base 13: mod_base = OTHER; note = 2'-O-Methyluridine
  modified_base 14: mod_base = OTHER; note = 2'-O-Methyluridine
  modified_base 15: mod_base = OTHER; note = 2'-O-Methylcytosine
  modified_base 16: mod_base = OTHER; note = 2'-O-Methyluridine
  modified_base 17: mod_base = OTHER; note = 2'-O-Methyladenosine
  modified_base 18: mod_base = OTHER; note = 2'-O-Methylcytosine
  modified_base 19: mod_base = OTHER; note = 2'-O-Methyladenosine
  modified_base 20: mod_base = OTHER; note = 2'-O-Methylguanosine
  modified_base 21: mod_base = OTHER; note = 2'-O-Methylcytosine
  modified_base 22: mod_base = OTHER; note = 2'-O-Methyladenosine
  modified_base 23: mod_base = OTHER; note = 2'-O-Methylguanosine
  modified_base 24: mod_base = OTHER; note = 2'-O-Methyluridine
  modified_base 25: mod_base = OTHER; note = 2'-O-Methyladenosine
  modified_base 26: mod_base = OTHER; note = 2'-O-Methylcytosine
  modified_base 27: mod_base = OTHER; note = 2'-O-Methyluridine
  modified_base 28: mod_base = OTHER; note = 2'-O-Methylguanosine
  modified_base 29: mod_base = OTHER; note = 2'-O-Methyladenosine
  modified_base 30: mod_base = OTHER; note = 2'-O-Methylguanosine
  modified_base 31: mod_base = OTHER; note = 2'-O-Methylcytosine
  modified_base 32: mod_base = OTHER; note = 2'-O-Methyladenosine
  modified_base 33: mod_base = OTHER; note = 2'-O-Methyladenosine
  modified_base 34: mod_base = OTHER; note = 2'-O-Methyluridine
  modified_base 35: mod_base = OTHER; note = 2'-O-Methylguanosine
  modified_base 38: mod_base = OTHER; note = Adenosine (R)-Glycol Nucleic Acid (R-GNA)
  modified_base 39: mod_base = OTHER; note = 2'-O-Methyluridine
  modified_base 40: mod_base = OTHER; note = 2'-O-Methyladenosine
  modified_base 41: mod_base = OTHER; note = 2'-O-Methylguanosine
  modified_base 42: mod_base = OTHER; note = 2'-O-Methyluridine
  modified_base 43: mod_base = OTHER; note = 2'-O-Methylcytosine
  modified_base 44: mod_base = OTHER; note = 2'-O-Methyladenosine
  modified_base 45: mod_base = OTHER; note = 2'-O-Methylguanosine
  modified_base 46: mod_base = OTHER; note = 2'-O-Methylcytosine phosphorothioate
  modified_base 47: mod_base = OTHER; note = 2'-O-Methyladenosine phosphorothioate
  modified_base 48: mod_base = OTHER; note = 2'-O-Methyladenosine phosphorothioate
  modified_base 49: mod_base = OTHER; note = 2'-O-Methyluridine phosphorothioate
  modified_base 50: mod_base = OTHER; note = 2'-O-Methylcytosine
  misc_feature 1..35: note = RNA
  misc_feature 36..37: note = DNA
  misc_feature 38..50: note = RNA

SEQ ID NO: 94 - DNA, 50 bp, synthetic construct; identical to SEQ ID NO: 70
  source 1..50: mol_type = other DNA; note = Description of Artificial Sequence: Synthetic oligonucleotide; note = Description of Combined DNA/RNA Molecule: Synthetic oligonucleotide
  modified_base 1: mod_base = OTHER; note = 2'-O-Methyluridine phosphorothioate
  modified_base 2: mod_base = OTHER; note = 2'-O-Methyluridine phosphorothioate
  modified_base 3: mod_base = OTHER; note = 2'-O-Methyluridine phosphorothioate
  modified_base 4: mod_base = OTHER; note = 2'-O-Methyluridine phosphorothioate
  modified_base 5: mod_base = OTHER; note = 2'-O-Methyluridine
  modified_base 6: mod_base = OTHER; note = 2'-O-Methyladenosine
  modified_base 7: mod_base = OTHER; note = 2'-O-Methyluridine
  modified_base 8: mod_base = OTHER; note = 2'-O-Methylcytosine
  modified_base 9: mod_base = OTHER; note = 2'-O-Methylcytosine
  modified_base 10: mod_base = OTHER; note = 2'-O-Methylcytosine
  modified_base 11: mod_base = OTHER; note = 2'-O-Methylcytosine
  modified_base 12: mod_base = OTHER; note = 2'-O-Methyladenosine
  modified_base 13: mod_base = OTHER; note = 2'-O-Methyluridine
  modified_base 14: mod_base = OTHER; note = 2'-O-Methyluridine
  modified_base 15: mod_base = OTHER; note = 2'-O-Methylcytosine
  modified_base 16: mod_base = OTHER; note = 2'-O-Methyluridine
  modified_base 17: mod_base = OTHER; note = 2'-O-Methyladenosine
  modified_base 18: mod_base = OTHER; note = 2'-O-Methylcytosine
  modified_base 19: mod_base = OTHER; note = 2'-O-Methyladenosine
  modified_base 20: mod_base = OTHER; note = 2'-O-Methylguanosine
  modified_base 21: mod_base = OTHER; note = 2'-O-Methylcytosine
  modified_base 22: mod_base = OTHER; note = 2'-O-Methyladenosine
  modified_base 23: mod_base = OTHER; note = 2'-O-Methylguanosine
  modified_base 24: mod_base = OTHER; note = 2'-O-Methyluridine
  modified_base 25: mod_base = OTHER; note = 2'-O-Methyladenosine
  modified_base 26: mod_base = OTHER; note = 2'-O-Methylcytosine
  modified_base 27: mod_base = OTHER; note = 2'-O-Methyluridine
  modified_base 28: mod_base = OTHER; note = 2'-O-Methylguanosine
  modified_base 29: mod_base = OTHER; note = 2'-O-Methyladenosine
  modified_base 30: mod_base = OTHER; note = 2'-O-Methylguanosine
  modified_base 31: mod_base = OTHER; note = 2'-O-Methylcytosine
  modified_base 32: mod_base = OTHER; note = 2'-O-Methyladenosine
  modified_base 33: mod_base = OTHER; note = 2'-O-Methyladenosine
  modified_base 34: mod_base = OTHER; note = 2'-O-Methyluridine
  modified_base 35: mod_base = OTHER; note = 2'-O-Methylguanosine
  modified_base 36: mod_base = OTHER; note = Cytosine Serineol Nucleic Acid
  modified_base 39: mod_base = OTHER; note = 2'-O-Methyluridine
  modified_base 40: mod_base = OTHER; note = 2'-O-Methyladenosine
  modified_base 41: mod_base = OTHER; note = 2'-O-Methylguanosine
  modified_base 42: mod_base = OTHER; note = 2'-O-Methyluridine
  modified_base 43: mod_base = OTHER; note = 2'-O-Methylcytosine
  modified_base 44: mod_base = OTHER; note = 2'-O-Methyladenosine
  modified_base 45: mod_base = OTHER; note = 2'-O-Methylguanosine
  modified_base 46: mod_base = OTHER; note = 2'-O-Methylcytosine phosphorothioate
  modified_base 47: mod_base = OTHER; note = 2'-O-Methyladenosine phosphorothioate
  modified_base 48: mod_base = OTHER; note = 2'-O-Methyladenosine phosphorothioate
  modified_base 49: mod_base = OTHER; note = 2'-O-Methyluridine phosphorothioate
  modified_base 50: mod_base = OTHER; note = 2'-O-Methylcytosine
  misc_feature 1..36: note = RNA
  misc_feature 37..38: note = DNA
  misc_feature 39..50: note = RNA

SEQ ID NO: 95 - DNA, 50 bp, synthetic construct; identical to SEQ ID NO: 70
  source 1..50: mol_type = other DNA; note = Description of Artificial Sequence: Synthetic oligonucleotide; note = Description of Combined DNA/RNA Molecule: Synthetic oligonucleotide
  modified_base 1: mod_base = OTHER; note = 2'-O-Methyluridine phosphorothioate
  modified_base 2: mod_base = OTHER; note = 2'-O-Methyluridine phosphorothioate
  modified_base 3: mod_base = OTHER; note = 2'-O-Methyluridine phosphorothioate
  modified_base 4: mod_base = OTHER; note = 2'-O-Methyluridine phosphorothioate
  modified_base 5: mod_base = OTHER; note = 2'-O-Methyluridine
  modified_base 6: mod_base = OTHER; note = 2'-O-Methyladenosine
  modified_base 7: mod_base = OTHER; note = 2'-O-Methyluridine
  modified_base 8: mod_base = OTHER; note = 2'-O-Methylcytosine
  modified_base 9: mod_base = OTHER; note = 2'-O-Methylcytosine
  modified_base 10: mod_base = OTHER; note = 2'-O-Methylcytosine
  modified_base 11: mod_base = OTHER; note = 2'-O-Methylcytosine
  modified_base 12: mod_base = OTHER; note = 2'-O-Methyladenosine
  modified_base 13: mod_base = OTHER; note = 2'-O-Methyluridine
  modified_base 14: mod_base = OTHER; note = 2'-O-Methyluridine
  modified_base 15: mod_base = OTHER; note = 2'-O-Methylcytosine
  modified_base 16: mod_base = OTHER; note = 2'-O-Methyluridine
  modified_base 17: mod_base = OTHER; note = 2'-O-Methyladenosine
  modified_base 18: mod_base = OTHER; note = 2'-O-Methylcytosine
  modified_base 19: mod_base = OTHER; note = 2'-O-Methyladenosine
  modified_base 20: mod_base = OTHER; note = 2'-O-Methylguanosine
  modified_base 21: mod_base = OTHER; note = 2'-O-Methylcytosine
  modified_base 22: mod_base = OTHER; note = 2'-O-Methyladenosine
  modified_base 23: mod_base = OTHER; note = 2'-O-Methylguanosine
  modified_base 24: mod_base = OTHER; note = 2'-O-Methyluridine
  modified_base 25: mod_base = OTHER; note = 2'-O-Methyladenosine
  modified_base 26: mod_base = OTHER; note = 2'-O-Methylcytosine
  modified_base 27: mod_base = OTHER; note = 2'-O-Methyluridine
  modified_base 28: mod_base = OTHER; note = 2'-O-Methylguanosine
  modified_base 29: mod_base = OTHER; note = 2'-O-Methyladenosine
  modified_base 30: mod_base = OTHER; note = 2'-O-Methylguanosine
  modified_base 31: mod_base = OTHER; note = 2'-O-Methylcytosine
  modified_base 32: mod_base = OTHER; note = 2'-O-Methyladenosine
  modified_base 33: mod_base = OTHER; note = 2'-O-Methyladenosine
  modified_base 34: mod_base = OTHER; note = 2'-O-Methyluridine
  modified_base 35: mod_base = OTHER; note = 2'-O-Methylguanosine
  modified_base 37: mod_base = OTHER; note = Cytosine Serineol Nucleic Acid
  modified_base 39: mod_base = OTHER; note = 2'-O-Methyluridine
  modified_base 40: mod_base = OTHER; note = 2'-O-Methyladenosine
  modified_base 41: mod_base = OTHER; note = 2'-O-Methylguanosine
  modified_base 42: mod_base = OTHER; note = 2'-O-Methyluridine
  modified_base 43: mod_base = OTHER; note = 2'-O-Methylcytosine
  modified_base 44: mod_base = OTHER; note = 2'-O-Methyladenosine
  modified_base 45: mod_base = OTHER; note = 2'-O-Methylguanosine
  modified_base 46: mod_base = OTHER; note = 2'-O-Methylcytosine phosphorothioate
  modified_base 47: mod_base = OTHER; note = 2'-O-Methyladenosine phosphorothioate
  modified_base 48: mod_base = OTHER; note = 2'-O-Methyladenosine phosphorothioate
  modified_base 49: mod_base = OTHER; note = 2'-O-Methyluridine phosphorothioate
  modified_base 50: mod_base = OTHER; note = 2'-O-Methylcytosine
  misc_feature 1..35: note = RNA
  misc_feature 36: note = DNA
  misc_feature 37: note = RNA
  misc_feature 38: note = DNA
  misc_feature 39..50: note = RNA

SEQ ID NO: 96 - DNA, 50 bp, synthetic construct
  source 1..50: mol_type = other DNA; note = Description of Artificial Sequence: Synthetic oligonucleotide; note = Description of Combined DNA/RNA Molecule: Synthetic oligonucleotide
  modified_base 1: mod_base = OTHER; note = 2'-O-Methyluridine phosphorothioate
  modified_base 2: mod_base = OTHER; note = 2'-O-Methyluridine phosphorothioate
  modified_base 3: mod_base = OTHER; note = 2'-O-Methyluridine phosphorothioate
  modified_base 4: mod_base = OTHER; note = 2'-O-Methyluridine phosphorothioate
  modified_base 5: mod_base = OTHER; note = 2'-O-Methyluridine
  modified_base 6: mod_base = OTHER; note = 2'-O-Methyladenosine
  modified_base 7: mod_base = OTHER; note = 2'-O-Methyluridine
  modified_base 8: mod_base = OTHER; note = 2'-O-Methylcytosine
  modified_base 9: mod_base = OTHER; note = 2'-O-Methylcytosine
  modified_base 10: mod_base = OTHER; note = 2'-O-Methylcytosine
  modified_base 11: mod_base = OTHER; note = 2'-O-Methylcytosine
  modified_base 12: mod_base = OTHER; note = 2'-O-Methyladenosine
  modified_base 13: mod_base = OTHER; note = 2'-O-Methyluridine
  modified_base 14: mod_base = OTHER; note = 2'-O-Methyluridine
  modified_base 15: mod_base = OTHER; note = 2'-O-Methylcytosine
  modified_base 16: mod_base = OTHER; note = 2'-O-Methyluridine
  modified_base 17: mod_base = OTHER; note = 2'-O-Methyladenosine
  modified_base 18: mod_base = OTHER; note = 2'-O-Methylcytosine
  modified_base 19: mod_base = OTHER; note = 2'-O-Methyladenosine
  modified_base 20: mod_base = OTHER; note = 2'-O-Methylguanosine
  modified_base 21: mod_base = OTHER; note = 2'-O-Methylcytosine
  modified_base 22: mod_base = OTHER; note = 2'-O-Methyladenosine
  modified_base 23: mod_base = OTHER; note = 2'-O-Methylguanosine
  modified_base 24: mod_base = OTHER; note = 2'-O-Methyluridine
  modified_base 25: mod_base = OTHER; note = 2'-O-Methyladenosine
  modified_base 26: mod_base = OTHER; note = 2'-O-Methylcytosine
  modified_base 27: mod_base = OTHER; note = 2'-O-Methyluridine
  modified_base 28: mod_base = OTHER; note = 2'-O-Methylguanosine
  modified_base 29: mod_base = OTHER; note = 2'-O-Methyladenosine
  modified_base 30: mod_base = OTHER; note = 2'-O-Methylguanosine
  modified_base 31: mod_base = OTHER; note = 2'-O-Methylcytosine
  modified_base 32: mod_base = OTHER; note = 2'-O-Methyladenosine
  modified_base 33: mod_base = OTHER; note = 2'-O-Methyladenosine
  modified_base 34: mod_base = OTHER; note = 2'-O-Methyluridine
  modified_base 35: mod_base = OTHER; note = 2'-O-Methylguanosine
  modified_base 38: mod_base = OTHER; note = Adenosine Serineol Nucleic Acid
  modified_base 39: mod_base = OTHER; note = 2'-O-Methyluridine
  modified_base 40: mod_base = OTHER; note = 2'-O-Methyladenosine
  modified_base 41: mod_base = OTHER; note = 2'-O-Methylguanosine
  modified_base 42: mod_base = OTHER; note = 2'-O-Methyluridine
  modified_base 43: mod_base = OTHER; note = 2'-O-Methylcytosine
  modified_base 44: mod_base = OTHER; note = 2'-O-Methyladenosine
  modified_base 45: mod_base = OTHER; note = 2'-O-Methylguanosine
  modified_base 46: mod_base = OTHER; note = 2'-O-Methylcytosine phosphorothioate
  modified_base 47: mod_base = OTHER; note = 2'-O-Methyladenosine phosphorothioate
  modified_base 48: mod_base = OTHER; note = 2'-O-Methyladenosine phosphorothioate
  modified_base 49: mod_base = OTHER; note = 2'-O-Methyluridine phosphorothioate
  modified_base 50: mod_base = OTHER; note = 2'-O-Methylcytosine
  misc_feature 1..35: note = RNA
  misc_feature 36..37: note = DNA
  misc_feature 38..50: note = RNA
tttttatccccattctacagcagtactgagcaatgcaatagtcagcaatc

SEQ ID NO: 97 - DNA, 50 bp, synthetic construct; identical to SEQ ID NO: 70
  source 1..50: mol_type = other DNA; note = Description of Artificial Sequence: Synthetic oligonucleotide; note = Description of Combined DNA/RNA Molecule: Synthetic oligonucleotide
  modified_base 1: mod_base = OTHER; note = 2'-O-Methyluridine phosphorothioate
  modified_base 2: mod_base = OTHER; note = 2'-O-Methyluridine phosphorothioate
  modified_base 3: mod_base = OTHER; note = 2'-O-Methyluridine phosphorothioate
  modified_base 4: mod_base = OTHER; note = 2'-O-Methyluridine phosphorothioate
  modified_base 5: mod_base = OTHER; note = 2'-O-Methyluridine
  modified_base 6: mod_base = OTHER; note = 2'-O-Methyladenosine
  modified_base 7: mod_base = OTHER; note = 2'-O-Methyluridine
  modified_base 8: mod_base = OTHER; note = 2'-O-Methylcytosine
  modified_base 9: mod_base = OTHER; note = 2'-O-Methylcytosine
  modified_base 10: mod_base = OTHER; note = 2'-O-Methylcytosine
  modified_base 11: mod_base = OTHER; note = 2'-O-Methylcytosine
  modified_base 12: mod_base = OTHER; note = 2'-O-Methyladenosine
  modified_base 13: mod_base = OTHER; note = 2'-O-Methyluridine
  modified_base 14: mod_base = OTHER; note = 2'-O-Methyluridine
  modified_base 15: mod_base = OTHER; note = 2'-O-Methylcytosine
  modified_base 16: mod_base = OTHER; note = 2'-O-Methyluridine
  modified_base 17: mod_base = OTHER; note = 2'-O-Methyladenosine
  modified_base 18: mod_base = OTHER; note = 2'-O-Methylcytosine
  modified_base 19: mod_base = OTHER; note = 2'-O-Methyladenosine
  modified_base 20: mod_base = OTHER; note = 2'-O-Methylguanosine
  modified_base 21: mod_base = OTHER; note = 2'-O-Methylcytosine
  modified_base 22: mod_base = OTHER; note = 2'-O-Methyladenosine
  modified_base 23: mod_base = OTHER; note = 2'-O-Methylguanosine
  modified_base 24: mod_base = OTHER; note = 2'-O-Methyluridine
  modified_base 25: mod_base = OTHER; note = 2'-O-Methyladenosine
  modified_base 26: mod_base = OTHER; note = 2'-O-Methylcytosine
  modified_base 27: mod_base = OTHER; note = 2'-O-Methyluridine
  modified_base 28: mod_base = OTHER; note = 2'-O-Methylguanosine
  modified_base 29: mod_base = OTHER; note = 2'-O-Methyladenosine
  modified_base 30: mod_base = OTHER; note = 2'-O-Methylguanosine
  modified_base 31: mod_base = OTHER; note = 2'-O-Methylcytosine
  modified_base 32: mod_base = OTHER; note = 2'-O-Methyladenosine
  modified_base 33: mod_base = OTHER; note = 2'-O-Methyladenosine
  modified_base 34: mod_base = OTHER; note = 2'-O-Methyluridine
  modified_base 35: mod_base = OTHER; note = 2'-O-Methylguanosine
  modified_base 36: mod_base = OTHER; note = Cytosine Flexible Nucleic Acid
  modified_base 39: mod_base = OTHER; note = 2'-O-Methyluridine
  modified_base 40: mod_base = OTHER; note = 2'-O-Methyladenosine
  modified_base 41: mod_base = OTHER; note = 2'-O-Methylguanosine
  modified_base 42: mod_base = OTHER; note = 2'-O-Methyluridine
  modified_base 43: mod_base = OTHER; note = 2'-O-Methylcytosine
  modified_base 44: mod_base = OTHER; note = 2'-O-Methyladenosine
  modified_base 45: mod_base = OTHER; note = 2'-O-Methylguanosine
  modified_base 46: mod_base = OTHER; note = 2'-O-Methylcytosine phosphorothioate
  modified_base 47: mod_base = OTHER; note = 2'-O-Methyladenosine phosphorothioate
  modified_base 48: mod_base = OTHER; note = 2'-O-Methyladenosine phosphorothioate
  modified_base 49: mod_base = OTHER; note = 2'-O-Methyluridine phosphorothioate
  modified_base 50: mod_base = OTHER; note = 2'-O-Methylcytosine
  misc_feature 1..36: note = RNA
  misc_feature 37..38: note = DNA
  misc_feature 39..50: note = RNA

SEQ ID NO: 98 - DNA, 50 bp, synthetic construct; identical to SEQ ID NO: 70
  source 1..50: mol_type = other DNA; note = Description of Artificial Sequence: Synthetic oligonucleotide; note = Description of Combined DNA/RNA Molecule: Synthetic oligonucleotide
  modified_base 1: mod_base = OTHER; note = 2'-O-Methyluridine phosphorothioate
  modified_base 2: mod_base = OTHER; note = 2'-O-Methyluridine phosphorothioate
  modified_base 3: mod_base = OTHER; note = 2'-O-Methyluridine phosphorothioate
  modified_base 4: mod_base = OTHER; note = 2'-O-Methyluridine phosphorothioate
  modified_base 5: mod_base = OTHER; note = 2'-O-Methyluridine
  modified_base 6: mod_base = OTHER; note = 2'-O-Methyladenosine
  modified_base 7: mod_base = OTHER; note = 2'-O-Methyluridine
  modified_base 8: mod_base = OTHER; note = 2'-O-Methylcytosine
  modified_base 9: mod_base = OTHER; note = 2'-O-Methylcytosine
  modified_base 10: mod_base = OTHER; note = 2'-O-Methylcytosine
  modified_base 11: mod_base = OTHER; note = 2'-O-Methylcytosine
  modified_base 12: mod_base = OTHER; note = 2'-O-Methyladenosine
  modified_base 13: mod_base = OTHER; note = 2'-O-Methyluridine
  modified_base 14: mod_base = OTHER; note = 2'-O-Methyluridine
  modified_base 15: mod_base = OTHER; note = 2'-O-Methylcytosine
  modified_base 16: mod_base = OTHER; note = 2'-O-Methyluridine
  modified_base 17: mod_base = OTHER; note = 2'-O-Methyladenosine
  modified_base 18: mod_base = OTHER; note = 2'-O-Methylcytosine
  modified_base 19: mod_base = OTHER; note = 2'-O-Methyladenosine
  modified_base 20: mod_base = OTHER; note = 2'-O-Methylguanosine
  modified_base 21: mod_base = OTHER; note = 2'-O-Methylcytosine
  modified_base 22: mod_base = OTHER; note = 2'-O-Methyladenosine
  modified_base 23: mod_base = OTHER; note = 2'-O-Methylguanosine
  modified_base 24: mod_base = OTHER; note = 2'-O-Methyluridine
  modified_base 25: mod_base = OTHER; note = 2'-O-Methyladenosine
  modified_base 26: mod_base = OTHER; note = 2'-O-Methylcytosine
  modified_base 27: mod_base = OTHER; note = 2'-O-Methyluridine
  modified_base 28: mod_base = OTHER; note = 2'-O-Methylguanosine
  modified_base 29: mod_base = OTHER; note = 2'-O-Methyladenosine
  modified_base 30: mod_base = OTHER; note = 2'-O-Methylguanosine
  modified_base 31: mod_base = OTHER; note = 2'-O-Methylcytosine
  modified_base 32: mod_base = OTHER; note = 2'-O-Methyladenosine
  modified_base 33: mod_base = OTHER; note = 2'-O-Methyladenosine
  modified_base 34: mod_base = OTHER; note = 2'-O-Methyluridine
  modified_base 35: mod_base = OTHER; note = 2'-O-Methylguanosine
  modified_base 37: mod_base = OTHER; note = Cytosine Flexible Nucleic Acid
  modified_base 39: mod_base = OTHER; note = 2'-O-Methyluridine
  modified_base 40: mod_base = OTHER; note = 2'-O-Methyladenosine
  modified_base 41: mod_base = OTHER; note = 2'-O-Methylguanosine
  modified_base 42: mod_base = OTHER; note = 2'-O-Methyluridine
  modified_base 43: mod_base = OTHER; note = 2'-O-Methylcytosine
  modified_base 44: mod_base = OTHER; note = 2'-O-Methyladenosine
  modified_base 45: mod_base = OTHER; note = 2'-O-Methylguanosine
  modified_base 46: mod_base = OTHER; note = 2'-O-Methylcytosine phosphorothioate
  modified_base 47: mod_base = OTHER; note = 2'-O-Methyladenosine phosphorothioate
  modified_base 48: mod_base = OTHER; note = 2'-O-Methyladenosine phosphorothioate
  modified_base 49: mod_base = OTHER; note = 2'-O-Methyluridine phosphorothioate
  modified_base 50: mod_base = OTHER; note = 2'-O-Methylcytosine
  misc_feature 1..35: note = RNA
  misc_feature 36: note = DNA
  misc_feature 37: note = RNA
  misc_feature 38: note = DNA
  misc_feature 39..50: note = RNA

SEQ ID NO: 99 - DNA, 50 bp, synthetic construct; identical to SEQ ID NO: 70
  source 1..50: mol_type = other DNA; note = Description of Artificial Sequence: Synthetic oligonucleotide; note = Description of Combined DNA/RNA Molecule: Synthetic oligonucleotide
  modified_base 1: mod_base = OTHER; note = 2'-O-Methyluridine phosphorothioate
  modified_base 2: mod_base = OTHER; note = 2'-O-Methyluridine phosphorothioate
  modified_base 3: mod_base = OTHER; note = 2'-O-Methyluridine phosphorothioate
  modified_base 4: mod_base = OTHER; note = 2'-O-Methyluridine phosphorothioate
  modified_base 5: mod_base = OTHER; note = 2'-O-Methyluridine
  modified_base 6: mod_base = OTHER; note = 2'-O-Methyladenosine
  modified_base 7: mod_base = OTHER; note = 2'-O-Methyluridine
  modified_base 8: mod_base = OTHER; note = 2'-O-Methylcytosine
  modified_base 9: mod_base = OTHER; note = 2'-O-Methylcytosine
  modified_base 10: mod_base = OTHER; note = 2'-O-Methylcytosine
  modified_base 11: mod_base = OTHER; note = 2'-O-Methylcytosine
  modified_base 12: mod_base = OTHER; note = 2'-O-Methyladenosine
  modified_base 13: mod_base = OTHER; note = 2'-O-Methyluridine
  modified_base 14: mod_base = OTHER; note = 2'-O-Methyluridine
  modified_base 15: mod_base = OTHER; note = 2'-O-Methylcytosine
  modified_base 16: mod_base = OTHER; note = 2'-O-Methyluridine
  modified_base 17: mod_base = OTHER; note = 2'-O-Methyladenosine
  modified_base 18: mod_base = OTHER; note = 2'-O-Methylcytosine
  modified_base 19: mod_base = OTHER; note = 2'-O-Methyladenosine
  modified_base 20: mod_base = OTHER; note = 2'-O-Methylguanosine
  modified_base 21: mod_base = OTHER; note = 2'-O-Methylcytosine
  modified_base 22: mod_base = OTHER; note = 2'-O-Methyladenosine
  modified_base 23: mod_base = OTHER; note = 2'-O-Methylguanosine
  modified_base 24: mod_base = OTHER; note = 2'-O-Methyluridine
  modified_base 25: mod_base = OTHER; note = 2'-O-Methyladenosine
  modified_base 26: mod_base = OTHER; note = 2'-O-Methylcytosine
  modified_base 27: mod_base = OTHER; note = 2'-O-Methyluridine
  modified_base 28: mod_base = OTHER; note = 2'-O-Methylguanosine
  modified_base 29: mod_base = OTHER; note = 2'-O-Methyladenosine
  modified_base 30: mod_base = OTHER; note = 2'-O-Methylguanosine
  modified_base 31: mod_base = OTHER; note = 2'-O-Methylcytosine
  modified_base 32: mod_base = OTHER; note = 2'-O-Methyladenosine
  modified_base 33: mod_base = OTHER; note = 2'-O-Methyladenosine
  modified_base 34: mod_base = OTHER; note = 2'-O-Methyluridine
  modified_base 35: mod_base = OTHER; note = 2'-O-Methylguanosine
  modified_base 38: mod_base = OTHER; note = Adenosine Flexible Nucleic Acid
  modified_base 39: mod_base = OTHER; note = 2'-O-Methyluridine
  modified_base 40: mod_base = OTHER; note = 2'-O-Methyladenosine
  modified_base 41: mod_base = OTHER; note = 2'-O-Methylguanosine
  modified_base 42: mod_base = OTHER; note = 2'-O-Methyluridine
  modified_base 43: mod_base = OTHER; note = 2'-O-Methylcytosine
  modified_base 44: mod_base = OTHER; note = 2'-O-Methyladenosine
  modified_base 45: mod_base = OTHER; note = 2'-O-Methylguanosine
  modified_base 46: mod_base = OTHER; note = 2'-O-Methylcytosine phosphorothioate
  modified_base 47: mod_base = OTHER; note = 2'-O-Methyladenosine phosphorothioate
  modified_base 48: mod_base = OTHER; note = 2'-O-Methyladenosine phosphorothioate
  modified_base 49: mod_base = OTHER; note = 2'-O-Methyluridine phosphorothioate
  modified_base 50: mod_base = OTHER; note = 2'-O-Methylcytosine
  misc_feature 1..35: note = RNA
  misc_feature 36..37: note = DNA
  misc_feature 38..50: note = RNA

SEQ ID NO: 100 - DNA, 50 bp, synthetic construct; identical to SEQ ID NO: 70
  source 1..50: mol_type = other DNA; note = Description of Artificial Sequence: Synthetic oligonucleotide; note = Description of Combined DNA/RNA Molecule: Synthetic oligonucleotide
  modified_base 1: mod_base = OTHER; note = 2'-O-Methyluridine phosphorothioate
  modified_base 2: mod_base = OTHER; note = 2'-O-Methyluridine phosphorothioate
  modified_base 3: mod_base = OTHER; note = 2'-O-Methyluridine phosphorothioate
  modified_base 4: mod_base = OTHER; note = 2'-O-Methyluridine phosphorothioate
  modified_base 5: mod_base = OTHER; note = 2'-O-Methyluridine
  modified_base 6: mod_base = OTHER; note = 2'-O-Methyladenosine
  modified_base 7: mod_base = OTHER; note = 2'-O-Methyluridine
  modified_base 8: mod_base = OTHER; note = 2'-O-Methylcytosine
  modified_base 9: mod_base = OTHER; note = 2'-O-Methylcytosine
  modified_base 10: mod_base = OTHER; note = 2'-O-Methylcytosine
  modified_base 11: mod_base = OTHER; note = 2'-O-Methylcytosine
  modified_base 12: mod_base = OTHER; note = 2'-O-Methyladenosine
  modified_base 13: mod_base = OTHER; note = 2'-O-Methyluridine
  modified_base 14: mod_base = OTHER; note = 2'-O-Methyluridine
  modified_base 15: mod_base = OTHER; note = 2'-O-Methylcytosine
  modified_base 16: mod_base = OTHER; note = 2'-O-Methyluridine
  modified_base 17: mod_base = OTHER; note = 2'-O-Methyladenosine
  modified_base 18: mod_base = OTHER; note = 2'-O-Methylcytosine
  modified_base 19: mod_base = OTHER; note = 2'-O-Methyladenosine
  modified_base 20: mod_base = OTHER; note = 2'-O-Methylguanosine
  modified_base 21: mod_base = OTHER; note = 2'-O-Methylcytosine
  modified_base 22: mod_base = OTHER; note = 2'-O-Methyladenosine
  modified_base 23: mod_base = OTHER; note = 2'-O-Methylguanosine
  modified_base 24: mod_base = OTHER; note = 2'-O-Methyluridine
  modified_base 25: mod_base = OTHER; note = 2'-O-Methyladenosine
  modified_base 26: mod_base = OTHER; note = 2'-O-Methylcytosine
  modified_base 27: mod_base = OTHER; note = 2'-O-Methyluridine
  modified_base 28: mod_base = OTHER; note = 2'-O-Methylguanosine
  modified_base 29: mod_base = OTHER; note = 2'-O-Methyladenosine
  modified_base 30: mod_base = OTHER; note = 2'-O-Methylguanosine
  modified_base 31: mod_base = OTHER; note = 2'-O-Methylcytosine
  modified_base 32: mod_base = OTHER; note = 2'-O-Methyladenosine
  modified_base 33: mod_base = OTHER; note = 2'-O-Methyladenosine
  modified_base 34: mod_base = OTHER; note = 2'-O-Methyluridine
  modified_base 35: mod_base = OTHER; note = 2'-O-Methylguanosine
  modified_base 36: mod_base = OTHER; note = Cytosine beta-D-hexitol nucleic acid
  modified_base 39: mod_base = OTHER; note = 2'-O-Methyluridine
  modified_base 40: mod_base = OTHER; note = 2'-O-Methyladenosine
  modified_base 41: mod_base = OTHER; note = 2'-O-Methylguanosine
  modified_base 42: mod_base = OTHER; note = 2'-O-Methyluridine
  modified_base 43: mod_base = OTHER; note = 2'-O-Methylcytosine
  modified_base 44: mod_base = OTHER; note = 2'-O-Methyladenosine
  modified_base 45: mod_base = OTHER; note = 2'-O-Methylguanosine
  modified_base 46: mod_base = OTHER; note = 2'-O-Methylcytosine phosphorothioate
  modified_base 47: mod_base = OTHER; note = 2'-O-Methyladenosine phosphorothioate
  modified_base 48: mod_base = OTHER; note = 2'-O-Methyladenosine phosphorothioate
  modified_base 49: mod_base = OTHER; note = 2'-O-Methyluridine phosphorothioate
  modified_base 50: mod_base = OTHER; note = 2'-O-Methylcytosine
  misc_feature 1..35: note = RNA
  misc_feature 36..38: note = DNA
  misc_feature 39..50: note = RNA

SEQ ID NO: 101 - DNA, 50 bp, synthetic construct; identical to SEQ ID NO: 70
  source 1..50: mol_type = other DNA; note = Description of Artificial Sequence: Synthetic oligonucleotide; note = Description of Combined DNA/RNA Molecule: Synthetic oligonucleotide
  modified_base 1: mod_base = OTHER; note = 2'-O-Methyluridine phosphorothioate
  modified_base 2: mod_base = OTHER; note = 2'-O-Methyluridine phosphorothioate
  modified_base 3: mod_base = OTHER; note = 2'-O-Methyluridine phosphorothioate
  modified_base 4: mod_base = OTHER; note = 2'-O-Methyluridine phosphorothioate
  modified_base 5: mod_base = OTHER; note = 2'-O-Methyluridine
  modified_base 6: mod_base = OTHER; note = 2'-O-Methyladenosine
  modified_base 7: mod_base = OTHER; note = 2'-O-Methyluridine
  modified_base 8: mod_base = OTHER; note = 2'-O-Methylcytosine
  modified_base 9: mod_base = OTHER; note = 2'-O-Methylcytosine
  modified_base 10: mod_base = OTHER; note = 2'-O-Methylcytosine
  modified_base 11: mod_base = OTHER; note = 2'-O-Methylcytosine
  modified_base 12: mod_base = OTHER; note = 2'-O-Methyladenosine
  modified_base 13: mod_base = OTHER; note = 2'-O-Methyluridine
  modified_base 14: mod_base = OTHER; note = 2'-O-Methyluridine
  modified_base 15: mod_base = OTHER; note = 2'-O-Methylcytosine
  modified_base 16: mod_base = OTHER; note = 2'-O-Methyluridine
  modified_base 17: mod_base = OTHER; note = 2'-O-Methyladenosine
  modified_base 18: mod_base = OTHER; note = 2'-O-Methylcytosine
  modified_base 19: mod_base = OTHER; note = 2'-O-Methyladenosine
  modified_base 20: mod_base = OTHER; note = 2'-O-Methylguanosine
  modified_base 21: mod_base = OTHER; note = 2'-O-Methylcytosine
  modified_base 22: mod_base = OTHER; note = 2'-O-Methyladenosine
  modified_base 23: mod_base = OTHER; note = 2'-O-Methylguanosine
  modified_base 24: mod_base = OTHER; note = 2'-O-Methyluridine
  modified_base 25: mod_base = OTHER; note = 2'-O-Methyladenosine
  modified_base 26: mod_base = OTHER; note = 2'-O-Methylcytosine
  modified_base 27: mod_base = OTHER; note = 2'-O-Methyluridine
  modified_base 28: mod_base = OTHER; note = 2'-O-Methylguanosine
  modified_base 29: mod_base = OTHER; note = 2'-O-Methyladenosine
  modified_base 30: mod_base = OTHER; note = 2'-O-Methylguanosine
  modified_base 31: mod_base = OTHER; note = 2'-O-Methylcytosine
  modified_base 32: mod_base = OTHER; note = 2'-O-Methyladenosine
  modified_base 33: mod_base = OTHER; note = 2'-O-Methyladenosine
  modified_base 34: mod_base = OTHER; note = 2'-O-Methyluridine
  modified_base 35: mod_base = OTHER; note = 2'-O-Methylguanosine
  modified_base 37: mod_base = OTHER; note = Cytosine beta-D-hexitol nucleic acid
  modified_base 39: mod_base = OTHER; note = 2'-O-Methyluridine
  modified_base 40: mod_base = OTHER; note = 2'-O-Methyladenosine
  modified_base 41: mod_base = OTHER; note = 2'-O-Methylguanosine
  modified_base 42: mod_base = OTHER; note = 2'-O-Methyluridine
  modified_base 43: mod_base = OTHER; note = 2'-O-Methylcytosine
  modified_base 44: mod_base = OTHER; note = 2'-O-Methyladenosine
  modified_base 45: mod_base = OTHER; note = 2'-O-Methylguanosine
  modified_base 46: mod_base = OTHER; note = 2'-O-Methylcytosine phosphorothioate
  modified_base 47: mod_base = OTHER; note = 2'-O-Methyladenosine phosphorothioate
  modified_base 48: mod_base = OTHER; note = 2'-O-Methyladenosine phosphorothioate
  modified_base 49: mod_base = OTHER; note = 2'-O-Methyluridine phosphorothioate
  modified_base 50: mod_base = OTHER; note = 2'-O-Methylcytosine
  misc_feature 1..35: note = RNA
  misc_feature 36..38: note = DNA
  misc_feature 39..50: note = RNA

SEQ ID NO: 102 - DNA, 50 bp, synthetic construct; identical to SEQ ID NO: 70
  source 1..50: mol_type = other DNA; note = Description of Artificial Sequence: Synthetic oligonucleotide; note = Description of Combined DNA/RNA Molecule: Synthetic oligonucleotide
  modified_base 1: mod_base = OTHER; note = 2'-O-Methyluridine phosphorothioate
  modified_base 2: mod_base = OTHER; note = 2'-O-Methyluridine phosphorothioate
  modified_base 3: mod_base = OTHER; note = 2'-O-Methyluridine phosphorothioate
  modified_base 4: mod_base = OTHER; note = 2'-O-Methyluridine phosphorothioate
  modified_base 5: mod_base = OTHER; note = 2'-O-Methyluridine
  modified_base 6: mod_base = OTHER; note = 2'-O-Methyladenosine
  modified_base 7: mod_base = OTHER; note = 2'-O-Methyluridine
  modified_base 8: mod_base = OTHER; note = 2'-O-Methylcytosine
  modified_base 9: mod_base = OTHER; note = 2'-O-Methylcytosine
  modified_base 10: mod_base = OTHER; note = 2'-O-Methylcytosine
  modified_base 11: mod_base = OTHER; note = 2'-O-Methylcytosine
  modified_base 12: mod_base = OTHER; note = 2'-O-Methyladenosine
  modified_base 13: mod_base = OTHER; note = 2'-O-Methyluridine
  modified_base 14: mod_base = OTHER; note = 2'-O-Methyluridine
  modified_base 15: mod_base = OTHER; note = 2'-O-Methylcytosine
  modified_base 16: mod_base = OTHER; note = 2'-O-Methyluridine
  modified_base 17: mod_base = OTHER; note = 2'-O-Methyladenosine
  modified_base 18: mod_base = OTHER; note = 2'-O-Methylcytosine
  modified_base 19: mod_base = OTHER; note = 2'-O-Methyladenosine
  modified_base 20: mod_base = OTHER; note = 2'-O-Methylguanosine
  modified_base 21: mod_base = OTHER; note = 2'-O-Methylcytosine
  modified_base 22: mod_base = OTHER; note = 2'-O-Methyladenosine
  modified_base 23: mod_base = OTHER; note = 2'-O-Methylguanosine
  modified_base 24: mod_base = OTHER; note = 2'-O-Methyluridine
  modified_base 25: mod_base = OTHER; note = 2'-O-Methyladenosine
  modified_base 26: mod_base = OTHER; note = 2'-O-Methylcytosine
  modified_base 27: mod_base = OTHER; note = 2'-O-Methyluridine
  modified_base 28: mod_base = OTHER; note = 2'-O-Methylguanosine
  modified_base 29: mod_base = OTHER; note = 2'-O-Methyladenosine
  modified_base 30: mod_base = OTHER; note = 2'-O-Methylguanosine
  modified_base 31: mod_base = OTHER; note = 2'-O-Methylcytosine
  modified_base 32: mod_base = OTHER; note = 2'-O-Methyladenosine
  modified_base 33: mod_base = OTHER; note = 2'-O-Methyladenosine
  modified_base 34: mod_base = OTHER; note = 2'-O-Methyluridine
  modified_base 35: mod_base = OTHER; note = 2'-O-Methylguanosine
  modified_base 38: mod_base = OTHER; note = Adenosine beta-D-hexitol nucleic acid
  modified_base 39: mod_base = OTHER; note = 2'-O-Methyluridine
  modified_base 40: mod_base = OTHER; note = 2'-O-Methyladenosine
  modified_base 41: mod_base = OTHER; note = 2'-O-Methylguanosine
  modified_base 42: mod_base = OTHER; note = 2'-O-Methyluridine
  modified_base 43: mod_base = OTHER; note = 2'-O-Methylcytosine
  modified_base 44: mod_base = OTHER; note = 2'-O-Methyladenosine
  modified_base 45: mod_base = OTHER; note = 2'-O-Methylguanosine
  modified_base 46: mod_base = OTHER; note = 2'-O-Methylcytosine phosphorothioate
  modified_base 47: mod_base = OTHER; note = 2'-O-Methyladenosine phosphorothioate
  modified_base 48: mod_base = OTHER; note = 2'-O-Methyladenosine phosphorothioate
  modified_base 49: mod_base = OTHER; note = 2'-O-Methyluridine phosphorothioate
  modified_base 50: mod_base = OTHER; note = 2'-O-Methylcytosine
  misc_feature 1..35: note = RNA
  misc_feature 36..38: note = DNA
  misc_feature 39..50: note = RNA

SEQ ID NO: 103 - DNA, 50 bp, synthetic construct
  source 1..50: mol_type = other DNA; note = Description of Artificial Sequence: Synthetic oligonucleotide; note = Description of Combined DNA/RNA Molecule: Synthetic oligonucleotide
  modified_base 1: mod_base = OTHER; note = 2'-O-Methyluridine phosphorothioate
  modified_base 2: mod_base = OTHER; note = 2'-O-Methyluridine phosphorothioate
  modified_base 3: mod_base = OTHER; note = 2'-O-Methyluridine phosphorothioate
  modified_base 4: mod_base = OTHER; note = 2'-O-Methyluridine phosphorothioate
  modified_base 5: mod_base = OTHER; note = 2'-O-Methyluridine
  modified_base 6: mod_base = OTHER; note = 2'-O-Methyladenosine
  modified_base 7: mod_base = OTHER; note = 2'-O-Methyluridine
  modified_base 8: mod_base = OTHER; note = 2'-O-Methylcytosine
  modified_base 9: mod_base = OTHER; note = 2'-O-Methylcytosine
  modified_base 10: mod_base = OTHER; note = 2'-O-Methylcytosine
  modified_base 11: mod_base = OTHER; note = 2'-O-Methylcytosine
  modified_base 12: mod_base = OTHER; note = 2'-O-Methyladenosine
  modified_base 13: mod_base = OTHER; note = 2'-O-Methyluridine
  modified_base 14: mod_base = OTHER; note = 2'-O-Methyluridine
  modified_base 15: mod_base = OTHER; note = 2'-O-Methylcytosine
  modified_base 16: mod_base = OTHER; note = 2'-O-Methyluridine
  modified_base 17: mod_base = OTHER; note = 2'-O-Methyladenosine
  modified_base 18: mod_base = OTHER; note = 2'-O-Methylcytosine
  modified_base 19: mod_base = OTHER; note = 2'-O-Methyladenosine
  modified_base 20: mod_base = OTHER; note = 2'-O-Methylguanosine
  modified_base 21: mod_base = OTHER; note = 2'-O-Methylcytosine
  modified_base 22: mod_base = OTHER; note = 2'-O-Methyladenosine
  modified_base 23: mod_base = OTHER; note = 2'-O-Methylguanosine
  modified_base 24: mod_base = OTHER; note = 2'-O-Methyluridine
  modified_base 25: mod_base = OTHER; note = 2'-O-Methyladenosine
  modified_base 26: mod_base = OTHER; note = 2'-O-Methylcytosine
  modified_base 27: mod_base = OTHER; note = 2'-O-Methyluridine
  modified_base 28: mod_base = OTHER; note = 2'-O-Methylguanosine
  modified_base 29: mod_base = OTHER; note = 2'-O-Methyladenosine
  modified_base 30: mod_base = OTHER; note = 2'-O-Methylguanosine
  modified_base 31: mod_base = OTHER; note = 2'-O-Methylcytosine
  modified_base 32: mod_base = OTHER; note = 2'-O-Methyladenosine
  modified_base 33: mod_base = OTHER; note = 2'-O-Methyladenosine
  modified_base 34: mod_base = OTHER; note = 2'-O-Methyluridine
  modified_base 35: mod_base = OTHER; note = 2'-O-Methylguanosine
  modified_base 36: mod_base = OTHER; note = Inosine
  modified_base 39: mod_base = OTHER; note = 2'-O-Methyluridine
  modified_base 40: mod_base = OTHER; note = 2'-O-Methyladenosine
  modified_base 41: mod_base = OTHER; note = 2'-O-Methylguanosine
  modified_base 42: mod_base = OTHER; note = 2'-O-Methyluridine
  modified_base 43: mod_base = OTHER; note = 2'-O-Methylcytosine
  modified_base 44: mod_base = OTHER; note = 2'-O-Methyladenosine
  modified_base 45: mod_base = OTHER; note = 2'-O-Methylguanosine
  modified_base 46: mod_base = OTHER; note = 2'-O-Methylcytosine phosphorothioate
  modified_base 47: mod_base = OTHER; note = 2'-O-Methyladenosine phosphorothioate
  modified_base 48: mod_base = OTHER; note = 2'-O-Methyladenosine phosphorothioate
  modified_base 49: mod_base = OTHER; note = 2'-O-Methyluridine phosphorothioate
  modified_base 50: mod_base = OTHER; note = 2'-O-Methylcytosine
  misc_feature 1..35: note = RNA
  misc_feature 36..38: note = DNA
  misc_feature 39..50: note = RNA
tttttatccccattctacagcagtactgagcaatgncatagtcagcaatc

SEQ ID NO: 104 - DNA, 50 bp, synthetic construct; identical to SEQ ID NO: 85
  source 1..50: mol_type = other DNA; note = Description of Artificial Sequence: Synthetic oligonucleotide; note = Description of Combined DNA/RNA Molecule: Synthetic oligonucleotide
  modified_base 1: mod_base = OTHER; note = 2'-O-Methyluridine phosphorothioate
  modified_base 2: mod_base = OTHER; note = 2'-O-Methyluridine phosphorothioate
  modified_base 3: mod_base = OTHER; note = 2'-O-Methyluridine phosphorothioate
  modified_base 4: mod_base = OTHER; note = 2'-O-Methyluridine phosphorothioate
  modified_base 5: mod_base = OTHER; note = 2'-O-Methyluridine
  modified_base 6: mod_base = OTHER; note = 2'-O-Methyladenosine
  modified_base 7: mod_base = OTHER; note = 2'-O-Methyluridine
  modified_base 8: mod_base = OTHER; note = 2'-O-Methylcytosine
  modified_base 9: mod_base = OTHER; note = 2'-O-Methylcytosine
  modified_base 10: mod_base = OTHER; note = 2'-O-Methylcytosine
  modified_base 11: mod_base = OTHER; note = 2'-O-Methylcytosine
  modified_base 12: mod_base = OTHER; note = 2'-O-Methyladenosine
  modified_base 13: mod_base = OTHER; note = 2'-O-Methyluridine
  modified_base 14: mod_base = OTHER; note = 2'-O-Methyluridine
  modified_base 15: mod_base = OTHER; note = 2'-O-Methylcytosine
  modified_base 16: mod_base = OTHER; note = 2'-O-Methyluridine
  modified_base 17: mod_base = OTHER; note = 2'-O-Methyladenosine
  modified_base 18: mod_base = OTHER; note = 2'-O-Methylcytosine
  modified_base 19: mod_base = OTHER; note = 2'-O-Methyladenosine
  modified_base 20: mod_base = OTHER; note = 2'-O-Methylguanosine
  modified_base 21: mod_base = OTHER; note = 2'-O-Methylcytosine
  modified_base 22: mod_base = OTHER; note = 2'-O-Methyladenosine
  modified_base 23: mod_base = OTHER; note = 2'-O-Methylguanosine
  modified_base 24: mod_base = OTHER; note = 2'-O-Methyluridine
  modified_base 25: mod_base = OTHER; note = 2'-O-Methyladenosine
  modified_base 26: mod_base = OTHER; note = 2'-O-Methylcytosine
  modified_base 27: mod_base = OTHER; note = 2'-O-Methyluridine
  modified_base 28: mod_base = OTHER; note = 2'-O-Methylguanosine
  modified_base 29: mod_base = OTHER; note = 2'-O-Methyladenosine
  modified_base 30: mod_base = OTHER; note = 2'-O-Methylguanosine
  modified_base 31: mod_base = OTHER; note = 2'-O-Methylcytosine
  modified_base 32: mod_base = OTHER; note = 2'-O-Methyladenosine
  modified_base 33: mod_base = OTHER; note = 2'-O-Methyladenosine
  modified_base 34: mod_base = OTHER; note = 2'-O-Methyluridine
  modified_base 35: mod_base = OTHER; note = 2'-O-Methylguanosine
  modified_base 37: mod_base = OTHER; note = Inosine
  modified_base 39: mod_base = OTHER; note = 2'-O-Methyluridine
  modified_base 40: mod_base = OTHER; note = 2'-O-Methyladenosine
  modified_base 41: mod_base = OTHER; note = 2'-O-Methylguanosine
  modified_base 42: mod_base = OTHER; note = 2'-O-Methyluridine
  modified_base 43: mod_base = OTHER; note = 2'-O-Methylcytosine
  modified_base 44: mod_base = OTHER; note = 2'-O-Methyladenosine
  modified_base 45: mod_base = OTHER; note = 2'-O-Methylguanosine
  modified_base 46: mod_base = OTHER; note = 2'-O-Methylcytosine phosphorothioate
  modified_base 47: mod_base = OTHER; note = 2'-O-Methyladenosine phosphorothioate
  modified_base 48: mod_base = OTHER; note = 2'-O-Methyladenosine phosphorothioate
  modified_base 49: mod_base = OTHER; note = 2'-O-Methyluridine phosphorothioate
  modified_base 50: mod_base = OTHER; note = 2'-O-Methylcytosine
  misc_feature 1..35: note = RNA
  misc_feature 36..38: note = DNA
  misc_feature 39..50: note = RNA

SEQ ID NO: 105 - DNA, 50 bp, synthetic construct
  source 1..50: mol_type = other DNA; note = Description of Artificial Sequence: Synthetic oligonucleotide; note = Description of Combined DNA/RNA Molecule: Synthetic oligonucleotide
  modified_base 1: mod_base = OTHER; note = 2'-O-Methyluridine phosphorothioate
  modified_base 2: mod_base = OTHER; note = 2'-O-Methyluridine phosphorothioate
  modified_base 3: mod_base = OTHER; note = 2'-O-Methyluridine phosphorothioate
  modified_base 4: mod_base = OTHER; note = 2'-O-Methyluridine phosphorothioate
  modified_base 5: mod_base = OTHER; note = 2'-O-Methyluridine
  modified_base 6: mod_base = OTHER; note = 2'-O-Methyladenosine
  modified_base 7: mod_base = OTHER; note = 2'-O-Methyluridine
  modified_base 8: mod_base = OTHER; note = 2'-O-Methylcytosine
  modified_base 9: mod_base = OTHER; note = 2'-O-Methylcytosine
  modified_base 10: mod_base = OTHER; note = 2'-O-Methylcytosine
  modified_base 11: mod_base = OTHER; note = 2'-O-Methylcytosine
  modified_base 12: mod_base = OTHER; note = 2'-O-Methyladenosine
  modified_base 13: mod_base = OTHER; note = 2'-O-Methyluridine
  modified_base 14: mod_base = OTHER; note = 2'-O-Methyluridine
  modified_base 15: mod_base = OTHER; note = 2'-O-Methylcytosine
  modified_base 16: mod_base = OTHER; note = 2'-O-Methyluridine
  modified_base 17: mod_base = OTHER; note = 2'-O-Methyladenosine
  modified_base 18: mod_base = OTHER; note = 2'-O-Methylcytosine
  modified_base 19: mod_base = OTHER; note = 2'-O-Methyladenosine
  modified_base 20: mod_base = OTHER; note = 2'-O-Methylguanosine
  modified_base 21: mod_base = OTHER; note = 2'-O-Methylcytosine
  modified_base 22: mod_base = OTHER; note = 2'-O-Methyladenosine
  modified_base 23: mod_base = OTHER; note = 2'-O-Methylguanosine
  modified_base 24: mod_base = OTHER; note = 2'-O-Methyluridine
  modified_base 25: mod_base = OTHER; note = 2'-O-Methyladenosine
  modified_base 26: mod_base = OTHER; note = 2'-O-Methylcytosine
  modified_base 27: mod_base = OTHER; note = 2'-O-Methyluridine
  modified_base 28: mod_base = OTHER; note = 2'-O-Methylguanosine
  modified_base 29: mod_base = OTHER; note = 2'-O-Methyladenosine
  modified_base 30: mod_base = OTHER; note = 2'-O-Methylguanosine
  modified_base 31: mod_base = OTHER; note = 2'-O-Methylcytosine
  modified_base 32: mod_base = OTHER; note = 2'-O-Methyladenosine
  modified_base 33: mod_base = OTHER; note = 2'-O-Methyladenosine
  modified_base 34: mod_base = OTHER; note = 2'-O-Methyluridine
  modified_base 35: mod_base = OTHER; note = 2'-O-Methylguanosine
  modified_base 38: mod_base = OTHER; note = Inosine
  modified_base 39: mod_base = OTHER; note = 2'-O-Methyluridine
  modified_base 40: mod_base = OTHER; note = 2'-O-Methyladenosine
  modified_base 41: mod_base = OTHER; note = 2'-O-Methylguanosine
  modified_base 42: mod_base = OTHER; note = 2'-O-Methyluridine
  modified_base 43: mod_base = OTHER; note = 2'-O-Methylcytosine
  modified_base 44: mod_base = OTHER; note = 2'-O-Methyladenosine
  modified_base 45: mod_base = OTHER; note = 2'-O-Methylguanosine
  modified_base 46: mod_base = OTHER; note = 2'-O-Methylcytosine phosphorothioate
  modified_base 47: mod_base = OTHER; note = 2'-O-Methyladenosine phosphorothioate
  modified_base 48: mod_base = OTHER; note = 2'-O-Methyladenosine phosphorothioate
  modified_base 49: mod_base = OTHER; note = 2'-O-Methyluridine phosphorothioate
  modified_base 50: mod_base = OTHER; note = 2'-O-Methylcytosine
  misc_feature 1..35: note = RNA
  misc_feature 36..38: note = DNA
  misc_feature 39..50: note = RNA
tttttatccccattctacagcagtactgagcaatgccntagtcagcaatc

SEQ ID NO: 106 - DNA, 50 bp, synthetic construct
  source 1..50: mol_type = other DNA; note = Description of Artificial Sequence: Synthetic oligonucleotide; note = Description of Combined DNA/RNA Molecule: Synthetic oligonucleotide
  modified_base 1: mod_base = OTHER; note = 2'-O-Methyluridine phosphorothioate
  modified_base 2: mod_base = OTHER; note = 2'-O-Methyluridine phosphorothioate
  modified_base 3: mod_base = OTHER; note = 2'-O-Methyluridine phosphorothioate
  modified_base 4: mod_base = OTHER; note = 2'-O-Methyluridine phosphorothioate
  modified_base 5: mod_base = OTHER; note = 2'-O-Methyluridine
  modified_base 6: mod_base = OTHER; note = 2'-O-Methyladenosine
  modified_base 7: mod_base = OTHER; note = 2'-O-Methyluridine
  modified_base 8: mod_base = OTHER; note = 2'-O-Methylcytosine
  modified_base 9: mod_base = OTHER; note = 2'-O-Methylcytosine
  modified_base 10: mod_base = OTHER; note = 2'-O-Methylcytosine
  modified_base 11: mod_base = OTHER; note = 2'-O-Methylcytosine
  modified_base 12: mod_base = OTHER; note = 2'-O-Methyladenosine
  modified_base 13: mod_base = OTHER; note = 2'-O-Methyluridine
  modified_base 14: mod_base = OTHER; note = 2'-O-Methyluridine
  modified_base 15: mod_base = OTHER; note = 2'-O-Methylcytosine
  modified_base 16: mod_base = OTHER; note = 2'-O-Methyluridine
  modified_base 17: mod_base = OTHER; note = 2'-O-Methyladenosine
  modified_base 18: mod_base = OTHER; note = 2'-O-Methylcytosine
  modified_base 19: mod_base = OTHER; note = 2'-O-Methyladenosine
  modified_base 20: mod_base = OTHER; note = 2'-O-Methylguanosine
  modified_base 21: mod_base = OTHER; note = 2'-O-Methylcytosine
  modified_base 22: mod_base = OTHER; note = 2'-O-Methyladenosine
  modified_base 23: mod_base = OTHER; note = 2'-O-Methylguanosine
  modified_base 24: mod_base = OTHER; note = 2'-O-Methyluridine
  modified_base 25: mod_base = OTHER; note = 2'-O-Methyladenosine
  modified_base 26: mod_base = OTHER; note = 2'-O-Methylcytosine
  modified_base 27: mod_base = OTHER; note = 2'-O-Methyluridine
  modified_base 28: mod_base = OTHER; note = 2'-O-Methylguanosine
  modified_base 29: mod_base = OTHER; note = 2'-O-Methyladenosine
  modified_base 30: mod_base = OTHER; note = 2'-O-Methylguanosine
  modified_base 31: mod_base = OTHER; note = 2'-O-Methylcytosine
  modified_base 32: mod_base = OTHER; note = 2'-O-Methyladenosine
  modified_base 33: mod_base = OTHER; note = 2'-O-Methyladenosine
  modified_base 34: mod_base = OTHER; note = 2'-O-Methyluridine
  modified_base 35: mod_base = OTHER; note = 2'-O-Methylguanosine
  modified_base 36: mod_base = OTHER; note = Inosine
  modified_base 37: mod_base = OTHER; note = Inosine
  modified_base 39: mod_base = OTHER; note = 2'-O-Methyluridine
  modified_base 40: mod_base = OTHER; note = 2'-O-Methyladenosine
  modified_base 41: mod_base = OTHER; note = 2'-O-Methylguanosine
  modified_base 42: mod_base = OTHER; note = 2'-O-Methyluridine
  modified_base 43: mod_base = OTHER; note = 2'-O-Methylcytosine
  modified_base 44: mod_base = OTHER; note = 2'-O-Methyladenosine
  modified_base 45: mod_base = OTHER; note = 2'-O-Methylguanosine
  modified_base 46: mod_base = OTHER; note = 2'-O-Methylcytosine phosphorothioate
  modified_base 47: mod_base = OTHER; note = 2'-O-Methyladenosine phosphorothioate
  modified_base 48: mod_base = OTHER; note = 2'-O-Methyladenosine phosphorothioate
  modified_base 49: mod_base = OTHER; note = 2'-O-Methyluridine phosphorothioate
  modified_base 50: mod_base = OTHER; note = 2'-O-Methylcytosine
  misc_feature 1..35: note = RNA
  misc_feature 36..38: note = DNA
  misc_feature 39..50: note = RNA
tttttatccccattctacagcagtactgagcaatgnnatagtcagcaatc

SEQ ID NO: 107 - DNA, 50 bp, synthetic construct
  source 1..50: mol_type = other DNA; note = Description of Artificial Sequence: Synthetic oligonucleotide; note = Description of Combined DNA/RNA Molecule: Synthetic oligonucleotide
  modified_base 1: mod_base = OTHER; note = 2'-O-Methyluridine phosphorothioate
  modified_base 2: mod_base = OTHER; note = 2'-O-Methyluridine phosphorothioate
  modified_base 3: mod_base = OTHER; note = 2'-O-Methyluridine phosphorothioate
  modified_base 4: mod_base = OTHER; note = 2'-O-Methyluridine phosphorothioate
  modified_base 5: mod_base = OTHER; note = 2'-O-Methyluridine
  modified_base 6: mod_base = OTHER; note = 2'-O-Methyladenosine
  modified_base 7: mod_base = OTHER; note = 2'-O-Methyluridine
  modified_base 8: mod_base = OTHER; note = 2'-O-Methylcytosine
  modified_base 9: mod_base = OTHER; note = 2'-O-Methylcytosine
  modified_base 10: mod_base = OTHER; note = 2'-O-Methylcytosine
  modified_base 11: mod_base = OTHER; note = 2'-O-Methylcytosine
  modified_base 12: mod_base = OTHER; note = 2'-O-Methyladenosine
  modified_base 13: mod_base = OTHER; note = 2'-O-Methyluridine
  modified_base 14: mod_base = OTHER; note = 2'-O-Methyluridine
  modified_base 15: mod_base = OTHER; note = 2'-O-Methylcytosine
  modified_base 16: mod_base = OTHER; note = 2'-O-Methyluridine
  modified_base 17: mod_base = OTHER; note = 2'-O-Methyladenosine
  modified_base 18: mod_base = OTHER; note = 2'-O-Methylcytosine
  modified_base 19: mod_base = OTHER; note = 2'-O-Methyladenosine
  modified_base 20: mod_base = OTHER; note = 2'-O-Methylguanosine
  modified_base 21: mod_base = OTHER; note = 2'-O-Methylcytosine
  modified_base 22: mod_base = OTHER; note = 2'-O-Methyladenosine
  modified_base 23: mod_base = OTHER; note = 2'-O-Methylguanosine
  modified_base 24: mod_base = OTHER; note = 2'-O-Methyluridine
  modified_base 25: mod_base = OTHER; note = 2'-O-Methyladenosine
  modified_base 26: mod_base = OTHER; note = 2'-O-Methylcytosine
  modified_base 27: mod_base = OTHER; note = 2'-O-Methyluridine
  modified_base 28: mod_base = OTHER; note = 2'-O-Methylguanosine
  modified_base 29: mod_base = OTHER; note = 2'-O-Methyladenosine
  modified_base 30: mod_base = OTHER; note = 2'-O-Methylguanosine
  modified_base 31: mod_base = OTHER; note = 2'-O-Methylcytosine
  modified_base 32: mod_base = OTHER; note = 2'-O-Methyladenosine
  modified_base 33: mod_base = OTHER; note = 2'-O-Methyladenosine
  modified_base 34: mod_base = OTHER; note = 2'-O-Methyluridine
  modified_base 35: mod_base = OTHER; note = 2'-O-Methylguanosine
  modified_base 37: mod_base = OTHER; note = Inosine
  modified_base 38: mod_base = OTHER; note = Inosine
  modified_base 39: mod_base = OTHER; note = 2'-O-Methyluridine
  modified_base 40: mod_base = OTHER; note = 2'-O-Methyladenosine
  modified_base 41: mod_base = OTHER; note = 2'-O-Methylguanosine
  modified_base 42: mod_base = OTHER; note = 2'-O-Methyluridine
  modified_base 43: mod_base = OTHER; note = 2'-O-Methylcytosine
  modified_base 44: mod_base = OTHER; note = 2'-O-Methyladenosine
  modified_base 45: mod_base = OTHER; note = 2'-O-Methylguanosine
  modified_base 46: mod_base = OTHER; note = 2'-O-Methylcytosine phosphorothioate
  modified_base 47: mod_base = OTHER; note = 2'-O-Methyladenosine phosphorothioate
  modified_base 48: mod_base = OTHER; note = 2'-O-Methyladenosine phosphorothioate
  modified_base 49: mod_base = OTHER; note = 2'-O-Methyluridine phosphorothioate
  modified_base 50: mod_base = OTHER; note = 2'-O-Methylcytosine
  misc_feature 1..35: note = RNA
  misc_feature 36..38: note = DNA
  misc_feature 39..50: note = RNA
tttttatccccattctacagcagtactgagcaatgcnntagtcagcaatc

SEQ ID NO: 108 - DNA, 50 bp, synthetic construct
  source 1..50: mol_type = other DNA; note = Description of Artificial Sequence: Synthetic oligonucleotide; note = Description of Combined DNA/RNA Molecule: Synthetic oligonucleotide
  modified_base 1: mod_base = OTHER; note = 2'-O-Methyluridine phosphorothioate
  modified_base 2: mod_base = OTHER; note = 2'-O-Methyluridine phosphorothioate
  modified_base 3: mod_base = OTHER; note = 2'-O-Methyluridine phosphorothioate
  modified_base 4: mod_base = OTHER; note = 2'-O-Methyluridine phosphorothioate
  modified_base 5: mod_base = OTHER; note = 2'-O-Methyluridine
  modified_base 6: mod_base = OTHER; note = 2'-O-Methyladenosine
  modified_base 7: mod_base = OTHER; note = 2'-O-Methyluridine
  modified_base 8: mod_base = OTHER; note = 2'-O-Methylcytosine
  modified_base 9: mod_base = OTHER; note = 2'-O-Methylcytosine
  modified_base 10: mod_base = OTHER; note = 2'-O-Methylcytosine
  modified_base 11: mod_base = OTHER; note = 2'-O-Methylcytosine
  modified_base 12: mod_base = OTHER; note = 2'-O-Methyladenosine
  modified_base 13: mod_base = OTHER; note = 2'-O-Methyluridine
  modified_base 14: mod_base = OTHER; note = 2'-O-Methyluridine
  modified_base 15: mod_base = OTHER; note = 2'-O-Methylcytosine
  modified_base 16: mod_base = OTHER; note = 2'-O-Methyluridine
  modified_base 17: mod_base = OTHER; note = 2'-O-Methyladenosine
  modified_base 18: mod_base = OTHER; note = 2'-O-Methylcytosine
  modified_base 19: mod_base = OTHER; note = 2'-O-Methyladenosine
  modified_base 20: mod_base = OTHER; note = 2'-O-Methylguanosine
  modified_base 21: mod_base = OTHER; note = 2'-O-Methylcytosine
  modified_base 22: mod_base = OTHER; note = 2'-O-Methyladenosine
  modified_base 23: mod_base = OTHER; note = 2'-O-Methylguanosine
  modified_base 24: mod_base = OTHER; note = 2'-O-Methyluridine
  modified_base 25: mod_base = OTHER; note = 2'-O-Methyladenosine
  modified_base 26: mod_base = OTHER; note = 2'-O-Methylcytosine
  modified_base 27: mod_base = OTHER; note = 2'-O-Methyluridine
  modified_base 28: mod_base = OTHER; note = 2'-O-Methylguanosine
  modified_base 29: mod_base = OTHER; note = 2'-O-Methyladenosine
  modified_base 30: mod_base = OTHER; note = 2'-O-Methylguanosine
  modified_base 31: mod_base = OTHER; note = 2'-O-Methylcytosine
  modified_base 32: mod_base = OTHER; note = 2'-O-Methyladenosine
  modified_base 33: mod_base = OTHER; note = 2'-O-Methyladenosine
  modified_base 34: mod_base = OTHER; note = 2'-O-Methyluridine
  modified_base 35: mod_base = OTHER; note = 2'-O-Methylguanosine
  modified_base 36: mod_base = OTHER; note = Inosine
  modified_base 38: mod_base = OTHER; note = Inosine
  modified_base 39: mod_base = OTHER; note = 2'-O-Methyluridine
  modified_base 40: mod_base = OTHER; note = 2'-O-Methyladenosine
  modified_base 41: mod_base = OTHER; note = 2'-O-Methylguanosine
  modified_base 42: mod_base = OTHER; note = 2'-O-Methyluridine
  modified_base 43: mod_base = OTHER; note = 2'-O-Methylcytosine
  modified_base 44: mod_base = OTHER; note = 2'-O-Methyladenosine
  modified_base 45: mod_base = OTHER; note = 2'-O-Methylguanosine
  modified_base 46: mod_base = OTHER; note = 2'-O-Methylcytosine phosphorothioate
  modified_base 47: mod_base = OTHER; note = 2'-O-Methyladenosine phosphorothioate
  modified_base 48: mod_base = OTHER; note = 2'-O-Methyladenosine phosphorothioate
  modified_base 49: mod_base = OTHER; note = 2'-O-Methyluridine phosphorothioate
  modified_base 50: mod_base = OTHER; note = 2'-O-Methylcytosine
  misc_feature 1..35: note = RNA
  misc_feature 36..38: note = DNA
  misc_feature 39..50: note = RNA
tttttatccccattctacagcagtactgagcaatgncntagtcagcaatc

SEQ ID NO: 109 - DNA, 50 bp, synthetic construct
  source 1..50: mol_type = other DNA; note = Description of Artificial Sequence: Synthetic oligonucleotide; note = Description of Combined DNA/RNA Molecule: Synthetic oligonucleotide
  modified_base 1: mod_base = OTHER; note = 2'-O-Methyluridine phosphorothioate
  modified_base 2: mod_base = OTHER; note = 2'-O-Methyluridine phosphorothioate
  modified_base 3: mod_base = OTHER; note = 2'-O-Methyluridine phosphorothioate
  modified_base 4: mod_base = OTHER; note = 2'-O-Methyluridine phosphorothioate
  modified_base 5: mod_base = OTHER; note = 2'-O-Methyluridine
  modified_base 6: mod_base = OTHER; note = 2'-O-Methyladenosine
  modified_base 7: mod_base = OTHER; note = 2'-O-Methyluridine
  modified_base 8: mod_base = OTHER; note = 2'-O-Methylcytosine
  modified_base 9: mod_base = OTHER; note = 2'-O-Methylcytosine
  modified_base 10: mod_base = OTHER; note = 2'-O-Methylcytosine
  modified_base 11: mod_base = OTHER; note = 2'-O-Methylcytosine
  modified_base 12: mod_base = OTHER; note = 2'-O-Methyladenosine
  modified_base 13: mod_base = OTHER; note = 2'-O-Methyluridine
  modified_base 14: mod_base = OTHER; note = 2'-O-Methyluridine
  modified_base 15: mod_base = OTHER; note = 2'-O-Methylcytosine
  modified_base 16: mod_base = OTHER; note = 2'-O-Methyluridine
  modified_base 17: mod_base = OTHER; note = 2'-O-Methyladenosine
  modified_base 18: mod_base = OTHER; note = 2'-O-Methylcytosine
  modified_base 19: mod_base = OTHER; note = 2'-O-Methyladenosine
  modified_base 20: mod_base = OTHER; note = 2'-O-Methylguanosine
  modified_base 21: mod_base = OTHER; note = 2'-O-Methylcytosine
  modified_base 22: mod_base = OTHER; note = 2'-O-Methyladenosine
  modified_base 23: mod_base = OTHER; note = 2'-O-Methylguanosine
  modified_base 24: mod_base = OTHER; note = 2'-O-Methyluridine
  modified_base 25: mod_base = OTHER; note = 2'-O-Methyladenosine
  modified_base 26: mod_base = OTHER; note = 2'-O-Methylcytosine
  modified_base 27: mod_base = OTHER; note = 2'-O-Methyluridine
  modified_base 28: mod_base = OTHER; note = 2'-O-Methylguanosine
  modified_base 29: mod_base = OTHER; note = 2'-O-Methyladenosine
  modified_base 30: mod_base = OTHER; note = 2'-O-Methylguanosine
  modified_base 31: mod_base = OTHER; note = 2'-O-Methylcytosine
  modified_base 32: mod_base = OTHER; note = 2'-O-Methyladenosine
  modified_base 33: mod_base = OTHER; note = 2'-O-Methyladenosine
  modified_base 34: mod_base = OTHER; note = 2'-O-Methyluridine
  modified_base 35: mod_base = OTHER; note = 2'-O-Methylguanosine
  modified_base 36: mod_base = OTHER; note = Inosine
  modified_base 37: mod_base = OTHER; note = Inosine
  modified_base 38: mod_base = OTHER; note = Inosine
  modified_base 39: mod_base = OTHER; note = 2'-O-Methyluridine
  modified_base 40: mod_base = OTHER; note = 2'-O-Methyladenosine
  modified_base 41: mod_base = OTHER; note = 2'-O-Methylguanosine
  modified_base 42: mod_base = OTHER; note = 2'-O-Methyluridine
  modified_base 43: mod_base = OTHER; note = 2'-O-Methylcytosine
  modified_base 44: mod_base = OTHER; note = 2'-O-Methyladenosine
  modified_base 45: mod_base = OTHER; note = 2'-O-Methylguanosine
  modified_base 46: mod_base = OTHER; note = 2'-O-Methylcytosine phosphorothioate
  modified_base 47: mod_base = OTHER; note = 2'-O-Methyladenosine phosphorothioate
  modified_base 48: mod_base = OTHER; note = 2'-O-Methyladenosine phosphorothioate
  modified_base 49: mod_base = OTHER; note = 2'-O-Methyluridine phosphorothioate
  modified_base 50: mod_base = OTHER; note = 2'-O-Methylcytosine
  misc_feature 1..35: note = RNA
  misc_feature 36..38: note = DNA
  misc_feature 39..50: note = RNA
tttttatccccattctacagcagtactgagcaatgnnntagtcagcaatc

SEQ ID NO: 110 - DNA, 63 bp, synthetic construct
  source 1..63: mol_type = other DNA; note = Description of Artificial Sequence: Synthetic oligonucleotide; note = Description of Combined DNA/RNA Molecule: Synthetic oligonucleotide
  modified_base 1: mod_base = OTHER; note = 2'-O-Methylguanosine phosphorothioate
  modified_base 2: mod_base = OTHER; note = 2'-O-Methyluridine phosphorothioate
  modified_base 3: mod_base = OTHER; note = 2'-O-Methylguanosine phosphorothioate
  modified_base 4: mod_base = OTHER; note = 2'-O-Methylguanosine phosphorothioate
  modified_base 5: mod_base = OTHER; note = 2'-O-Methyladenosine
  modified_base 6: mod_base = OTHER; note = 2'-O-Methyladenosine
  modified_base 7: mod_base = OTHER; note = 2'-O-Methyluridine
  modified_base 8: mod_base = OTHER; note = 2'-O-Methyladenosine
  modified_base 9: mod_base = OTHER; note = 2'-O-Methylguanosine
  modified_base 10: mod_base = OTHER; note = 2'-O-Methyluridine
  modified_base 11: mod_base = OTHER; note = 2'-O-Methyladenosine
  modified_base 12: mod_base = OTHER; note = 2'-O-Methyluridine
  modified_base 13: mod_base = OTHER; note = 2'-O-Methyladenosine
  modified_base 14: mod_base = OTHER; note = 2'-O-Methyladenosine
  modified_base 15: mod_base = OTHER; note = 2'-O-Methylcytosine
  modified_base 16: mod_base = OTHER; note = 2'-O-Methyladenosine
  modified_base 17: mod_base = OTHER; note = 2'-O-Methyladenosine
  modified_base 18: mod_base = OTHER; note = 2'-O-Methyluridine
  modified_base 19: mod_base = OTHER; note = 2'-O-Methyladenosine
  modified_base 20: mod_base = OTHER; note = 2'-O-Methyluridine
  modified_base 21: mod_base = OTHER; note = 2'-O-Methylguanosine
  modified_base 22: mod_base = OTHER; note = 2'-O-Methylcytosine
  modified_base 23: mod_base = OTHER; note = 2'-O-Methyluridine
  modified_base 24: mod_base = OTHER; note = 2'-O-Methyladenosine
  modified_base 25: mod_base = OTHER; note = 2'-O-Methyladenosine
  modified_base 26: mod_base = OTHER; note = 2'-O-Methyladenosine
  modified_base 27: mod_base = OTHER; note = 2'-O-Methyluridine
  modified_base 28: mod_base = OTHER; note = 2'-O-Methylguanosine
  modified_base 29: mod_base = OTHER; note = 2'-O-Methyluridine
  modified_base 30: mod_base = OTHER; note = 2'-O-Methyluridine
  modified_base 31: mod_base = OTHER; note = 2'-O-Methylguanosine
  modified_base 32: mod_base = OTHER; note = 2'-O-Methyluridine
  modified_base 33: mod_base = OTHER; note = 2'-O-Methyluridine
  modified_base 34: mod_base = OTHER; note = 2'-O-Methyladenosine
  modified_base 35: mod_base = OTHER; note = 2'-O-Methyluridine
  modified_base 36: mod_base = OTHER; note = 2'-O-Methyladenosine
  modified_base 37: mod_base = OTHER; note = 2'-O-Methylguanosine
  modified_base 38: mod_base = OTHER; note = 2'-O-Methyluridine
  modified_base 39: mod_base = OTHER; note = 2'-O-Methyladenosine
  modified_base 40: mod_base = OTHER; note = 2'-O-Methyluridine
  modified_base 41: mod_base = OTHER; note = 2'-O-Methylcytosine
  modified_base 42: mod_base = OTHER; note = 2'-O-Methylcytosine
  modified_base 43: mod_base = OTHER; note = 2'-O-Methylcytosine
  modified_base 44: mod_base = OTHER; note = 2'-O-Methyladenosine
  modified_base 45: mod_base = OTHER; note = 2'-O-Methylcytosine
  modified_base 46: mod_base = OTHER; note = 2'-O-Methylguanosine
  modified_base 47: mod_base = OTHER; note = 2'-O-Methylcytosine
  modified_base 48: mod_base = OTHER; note = 2'-O-Methyladenosine
  modified_base 49: mod_base = OTHER; note = 2'-O-Methyladenosine
  modified_base 50: mod_base = OTHER; note = 2'-O-Methyluridine
  modified_base 51: mod_base = OTHER; note = 2'-O-Methylguanosine
  modified_base 55: mod_base = OTHER; note = 2'-O-Methyluridine
  modified_base 56: mod_base = OTHER; note = 2'-O-Methyladenosine
  modified_base 57: mod_base = OTHER; note = 2'-O-Methylguanosine
  modified_base 58: mod_base = OTHER; note = 2'-O-Methyluridine
  modified_base 59: mod_base = OTHER; note = 2'-O-Methylcytosine phosphorothioate
  modified_base 60: mod_base = OTHER; note = 2'-O-Methyladenosine phosphorothioate
  modified_base 61: mod_base = OTHER; note = 2'-O-Methylguanosine phosphorothioate
  modified_base 62: mod_base = OTHER; note = 2'-O-Methylcytosine phosphorothioate
  modified_base 63: mod_base = OTHER; note = 2'-O-Methyladenosine
  misc_feature 1..51: note = RNA
  misc_feature 52..54: note = DNA
  misc_feature 55..63: note = RNA
gtggaatagtataacaatatgctaaatgttgttatagtatcccacgcaatgccgtagtcagca

SEQ ID NO: 111 - DNA, 63 bp, synthetic construct
  source 1..63: mol_type = other DNA; note = Description of Artificial Sequence: Synthetic oligonucleotide; note = Description of Combined DNA/RNA Molecule: Synthetic oligonucleotide
  modified_base 1: mod_base = OTHER; note = 2'-O-Methylguanosine phosphorothioate
  modified_base 2: mod_base = OTHER; note = 2'-O-Methyluridine phosphorothioate
  modified_base 3: mod_base = OTHER; note = 2'-O-Methylguanosine phosphorothioate
  modified_base 4: mod_base = OTHER; note = 2'-O-Methylguanosine phosphorothioate
  modified_base 5: mod_base = OTHER; note = 2'-O-Methyladenosine
  modified_base 6: mod_base = OTHER; note = 2'-O-Methyladenosine
  modified_base 7: mod_base = OTHER; note = 2'-O-Methyluridine
  modified_base 8: mod_base = OTHER; note = 2'-O-Methyladenosine
  modified_base 9: mod_base = OTHER; note = 2'-O-Methylguanosine
  modified_base 10: mod_base = OTHER; note = 2'-O-Methyluridine
  modified_base 11: mod_base = OTHER; note = 2'-O-Methyladenosine
  modified_base 12: mod_base = OTHER; note = 2'-O-Methyluridine
  modified_base 13: mod_base = OTHER; note = 2'-O-Methyladenosine
  modified_base 14: mod_base = OTHER; note = 2'-O-Methyladenosine
  modified_base 15: mod_base = OTHER; note = 2'-O-Methylcytosine
  modified_base 16: mod_base = OTHER; note = 2'-O-Methyladenosine
  modified_base 17: mod_base = OTHER; note = 2'-O-Methyladenosine
  modified_base 18: mod_base = OTHER; note = 2'-O-Methyluridine
  modified_base 19: mod_base = OTHER; note = 2'-O-Methyladenosine
  modified_base 20: mod_base = OTHER; note = 2'-O-Methyluridine
  modified_base 21: mod_base = OTHER; note = 2'-O-Methylguanosine
  modified_base 22: mod_base = OTHER; note = 2'-O-Methylcytosine
  modified_base 23: mod_base = OTHER; note = 2'-O-Methyluridine
  modified_base 24: mod_base = OTHER; note = 2'-O-Methyladenosine
  modified_base 25: mod_base = OTHER; note = 2'-O-Methyladenosine
  modified_base 26: mod_base = OTHER; note = 2'-O-Methyladenosine
  modified_base 27: mod_base = OTHER; note = 2'-O-Methyluridine
  modified_base 28: mod_base = OTHER; note = 2'-O-Methylguanosine
  modified_base 29: mod_base = OTHER; note = 2'-O-Methyluridine
  modified_base 30: mod_base = OTHER; note = 2'-O-Methyluridine
  modified_base 31: mod_base = OTHER; note = 2'-O-Methylguanosine
  modified_base 32: mod_base = OTHER; note = 2'-O-Methyluridine
  modified_base 33: mod_base = OTHER; note = 2'-O-Methyluridine
  modified_base 34: mod_base = OTHER; note = 2'-O-Methyladenosine
  modified_base 35: mod_base = OTHER; note = 2'-O-Methyluridine
  modified_base 36: mod_base = OTHER; note = 2'-O-Methyladenosine
  modified_base 37: mod_base = OTHER; note = 2'-O-Methylguanosine
  modified_base 38: mod_base = OTHER; note = 2'-O-Methyluridine
  modified_base 39: mod_base = OTHER; note = 2'-O-Methyladenosine
  modified_base 40: mod_base = OTHER; note = 2'-O-Methyluridine
  modified_base 41: mod_base = OTHER; note = 2'-O-Methylcytosine
  modified_base 42: mod_base = OTHER; note = 2'-O-Methylcytosine
  modified_base 43: mod_base = OTHER; note = 2'-O-Methylcytosine
  modified_base 44: mod_base = OTHER; note = 2'-O-Methyladenosine
  modified_base 45: mod_base = OTHER; note = 2'-O-Methylcytosine
  modified_base 46: mod_base = OTHER; note = 2'-O-Methylguanosine
  modified_base 47: mod_base = OTHER; note = 2'-O-Methylcytosine
  modified_base 48: mod_base = OTHER; note = 2'-O-Methyladenosine
  modified_base 49: mod_base = OTHER; note = 2'-O-Methyladenosine
  modified_base 50: mod_base = OTHER; note = 2'-O-Methyluridine
  modified_base 51: mod_base = OTHER; note = 2'-O-Methylguanosine
  modified_base 55: mod_base = OTHER; note = 2'-O-Methyluridine
  modified_base 56: mod_base = OTHER; note = 2'-O-Methyladenosine
  modified_base 57: mod_base = OTHER; note = 2'-O-Methylguanosine
  modified_base 58: mod_base = OTHER; note = 2'-O-Methyluridine
  modified_base 59: mod_base = OTHER; note = 2'-O-Methylcytosine phosphorothioate
  modified_base 60: mod_base = OTHER; note = 2'-O-Methyladenosine phosphorothioate
  modified_base 61: mod_base = OTHER; note = 2'-O-Methylguanosine phosphorothioate
  modified_base 62: mod_base = OTHER; note = 2'-O-Methylcytosine phosphorothioate
  modified_base 63: mod_base = OTHER; note = 2'-O-Methyladenosine
  misc_feature 1..51: note = RNA
  misc_feature 52..54: note = DNA
  misc_feature 55..63: note = RNA
gtggaatagtataacaatatgctaaatgttgttatagtatcccacgcaatgccatagtcagca

SEQ ID NO: 112 - DNA, 63 bp, synthetic construct; identical to SEQ ID NO: 111
  source 1..63: mol_type = other DNA; note = Description of Artificial Sequence: Synthetic oligonucleotide; note = Description of Combined DNA/RNA Molecule: Synthetic oligonucleotide
  modified_base 1: mod_base = OTHER; note = 2'-O-Methylguanosine phosphorothioate
  modified_base 2: mod_base = OTHER; note = 2'-O-Methyluridine phosphorothioate
  modified_base 3: mod_base = OTHER; note = 2'-O-Methylguanosine phosphorothioate
  modified_base 4: mod_base = OTHER; note = 2'-O-Methylguanosine phosphorothioate
  modified_base 5: mod_base = OTHER; note = 2'-O-Methyladenosine
  modified_base 6: mod_base = OTHER; note = 2'-O-Methyladenosine
  modified_base 7: mod_base = OTHER; note = 2'-O-Methyluridine
  modified_base 8: mod_base = OTHER; note = 2'-O-Methyladenosine
  modified_base 9: mod_base = OTHER; note = 2'-O-Methylguanosine
  modified_base 10: mod_base = OTHER; note = 2'-O-Methyluridine
  modified_base 11: mod_base = OTHER; note = 2'-O-Methyladenosine
  modified_base 12: mod_base = OTHER; note = 2'-O-Methyluridine
  modified_base 13: mod_base = OTHER; note = 2'-O-Methyladenosine
  modified_base 14: mod_base = OTHER; note = 2'-O-Methyladenosine
  modified_base 15: mod_base = OTHER; note = 2'-O-Methylcytosine
  modified_base 16: mod_base = OTHER; note = 2'-O-Methyladenosine
  modified_base 17: mod_base = OTHER; note = 2'-O-Methyladenosine
  modified_base 18: mod_base = OTHER; note = 2'-O-Methyluridine
  modified_base 19: mod_base = OTHER; note = 2'-O-Methyladenosine
  modified_base 20: mod_base = OTHER; note = 2'-O-Methyluridine
  modified_base 21: mod_base = OTHER; note = 2'-O-Methylguanosine
  modified_base 22: mod_base = OTHER; note = 2'-O-Methylcytosine
  modified_base 23: mod_base = OTHER; note = 2'-O-Methyluridine
  modified_base 24: mod_base = OTHER; note = 2'-O-Methyladenosine
  modified_base 25: mod_base = OTHER; note = 2'-O-Methyladenosine
  modified_base 26: mod_base = OTHER; note = 2'-O-Methyladenosine
  modified_base 27: mod_base = OTHER; note = 2'-O-Methyluridine
  modified_base 28: mod_base = OTHER; note = 2'-O-Methylguanosine
  modified_base 29: mod_base = OTHER; note = 2'-O-Methyluridine
  modified_base 30: mod_base = OTHER; note = 2'-O-Methyluridine
  modified_base 31: mod_base = OTHER; note = 2'-O-Methylguanosine
  modified_base 32: mod_base = OTHER; note = 2'-O-Methyluridine
  modified_base 33: mod_base = OTHER; note = 2'-O-Methyluridine
  modified_base 34: mod_base = OTHER; note = 2'-O-Methyladenosine
  modified_base 35: mod_base = OTHER; note = 2'-O-Methyluridine
  modified_base 36: mod_base = OTHER; note = 2'-O-Methyladenosine
  modified_base 37: mod_base = OTHER; note = 2'-O-Methylguanosine
  modified_base 38: mod_base = OTHER; note = 2'-O-Methyluridine
  modified_base 39: mod_base = OTHER; note = 2'-O-Methyladenosine
  modified_base 40: mod_base = OTHER; note = 2'-O-Methyluridine
  modified_base 41: mod_base = OTHER; note = 2'-O-Methylcytosine
  modified_base 42: mod_base = OTHER; note = 2'-O-Methylcytosine
  modified_base 43: mod_base = OTHER; note = 2'-O-Methylcytosine
  modified_base 44: mod_base = OTHER; note = 2'-O-Methyladenosine
  modified_base 45: mod_base = OTHER; note = 2'-O-Methylcytosine
  modified_base 46: mod_base = OTHER; note = 2'-O-Methylguanosine
  modified_base 47: mod_base = OTHER; note = 2'-O-Methylcytosine
  modified_base 48: mod_base = OTHER; note = 2'-O-Methyladenosine
  modified_base 49: mod_base = OTHER; note = 2'-O-Methyladenosine
  modified_base 50: mod_base = OTHER; note = 2'-O-Methyluridine
  modified_base 51: mod_base = OTHER; note = 2'-O-Methylguanosine
  modified_base 52: mod_base = OTHER; note = 2'-F-arabinose cytosine
  modified_base 55: mod_base = OTHER; note = 2'-O-Methyluridine
  modified_base 56: mod_base = OTHER; note = 2'-O-Methyladenosine
  modified_base 57: mod_base = OTHER; note = 2'-O-Methylguanosine
  modified_base 58: mod_base = OTHER; note = 2'-O-Methyluridine
  modified_base 59: mod_base = OTHER; note = 2'-O-Methylcytosine phosphorothioate
  modified_base 60: mod_base = OTHER; note = 2'-O-Methyladenosine phosphorothioate
  modified_base 61: mod_base = OTHER; note = 2'-O-Methylguanosine phosphorothioate
  modified_base 62: mod_base = OTHER; note = 2'-O-Methylcytosine phosphorothioate
  modified_base 63: mod_base = OTHER; note = 2'-O-Methyladenosine
  misc_feature 1..52: note = RNA
  misc_feature 53..54: note = DNA
  misc_feature 55..63: note = RNA

SEQ ID NO: 113 - DNA, 63 bp, synthetic construct; identical to SEQ ID NO: 111
  source 1..63: mol_type = other DNA; note = Description of Artificial Sequence: Synthetic oligonucleotide; note = Description of Combined DNA/RNA Molecule: Synthetic oligonucleotide
  modified_base 1: mod_base = OTHER; note = 2'-O-Methylguanosine phosphorothioate
  modified_base 2: mod_base = OTHER; note = 2'-O-Methyluridine phosphorothioate
  modified_base 3: mod_base = OTHER; note = 2'-O-Methylguanosine phosphorothioate
  modified_base 4: mod_base = OTHER; note = 2'-O-Methylguanosine phosphorothioate
  modified_base 5: mod_base = OTHER; note = 2'-O-Methyladenosine
  modified_base 6: mod_base = OTHER; note = 2'-O-Methyladenosine
  modified_base 7: mod_base = OTHER; note = 2'-O-Methyluridine
  modified_base 8: mod_base = OTHER; note = 2'-O-Methyladenosine
  modified_base 9: mod_base = OTHER; note = 2'-O-Methylguanosine
  modified_base 10: mod_base = OTHER; note = 2'-O-Methyluridine
  modified_base 11: mod_base = OTHER; note = 2'-O-Methyladenosine
  modified_base 12: mod_base = OTHER; note = 2'-O-Methyluridine
  modified_base 13: mod_base = OTHER; note = 2'-O-Methyladenosine
  modified_base 14: mod_base = OTHER; note = 2'-O-Methyladenosine
  modified_base 15: mod_base = OTHER; note = 2'-O-Methylcytosine
  modified_base 16: mod_base = OTHER; note = 2'-O-Methyladenosine
  modified_base 17: mod_base = OTHER; note = 2'-O-Methyladenosine
  modified_base 18: mod_base = OTHER; note = 2'-O-Methyluridine
  modified_base 19: mod_base = OTHER; note = 2'-O-Methyladenosine
  modified_base 20: mod_base = OTHER; note = 2'-O-Methyluridine
  modified_base 21: mod_base = OTHER; note = 2'-O-Methylguanosine
  modified_base 22: mod_base = OTHER; note = 2'-O-Methylcytosine
  modified_base 23: mod_base = OTHER; note = 2'-O-Methyluridine
  modified_base 24: mod_base = OTHER; note = 2'-O-Methyladenosine
  modified_base 25: mod_base = OTHER; note = 2'-O-Methyladenosine
  modified_base 26: mod_base = OTHER; note = 2'-O-Methyladenosine
  modified_base 27: mod_base = OTHER; note = 2'-O-Methyluridine
  modified_base 28: mod_base = OTHER; note = 2'-O-Methylguanosine
  modified_base 29: mod_base = OTHER; note = 2'-O-Methyluridine
  modified_base 30: mod_base = OTHER; note = 2'-O-Methyluridine
  modified_base 31: mod_base = OTHER; note = 2'-O-Methylguanosine
  modified_base 32: mod_base = OTHER; note = 2'-O-Methyluridine
  modified_base 33: mod_base = OTHER; note = 2'-O-Methyluridine
  modified_base 34: mod_base = OTHER; note = 2'-O-Methyladenosine
  modified_base 35: mod_base = OTHER; note = 2'-O-Methyluridine
  modified_base 36: mod_base = OTHER; note = 2'-O-Methyladenosine
  modified_base 37: mod_base = OTHER; note = 2'-O-Methylguanosine
  modified_base 38: mod_base = OTHER; note = 2'-O-Methyluridine
  modified_base 39: mod_base = OTHER; note = 2'-O-Methyladenosine
  modified_base 40: mod_base = OTHER; note = 2'-O-Methyluridine
  modified_base 41: mod_base = OTHER; note = 2'-O-Methylcytosine
  modified_base 42: mod_base = OTHER; note = 2'-O-Methylcytosine
  modified_base 43: mod_base = OTHER; note = 2'-O-Methylcytosine
  modified_base 44: mod_base = OTHER; note = 2'-O-Methyladenosine
  modified_base 45: mod_base = OTHER; note = 2'-O-Methylcytosine
  modified_base 46: mod_base = OTHER; note = 2'-O-Methylguanosine
  modified_base 47: mod_base = OTHER; note = 2'-O-Methylcytosine
  modified_base 48: mod_base = OTHER; note = 2'-O-Methyladenosine
  modified_base 49: mod_base = OTHER; note = 2'-O-Methyladenosine
  modified_base 50: mod_base = OTHER; note = 2'-O-Methyluridine
  modified_base 51: mod_base = OTHER; note = 2'-O-Methylguanosine
  modified_base 53: mod_base = OTHER; note = 2'-F-arabinose cytosine
  modified_base 55: mod_base = OTHER; note = 2'-O-Methyluridine
  modified_base 56: mod_base = OTHER; note = 2'-O-Methyladenosine
  modified_base 57: mod_base = OTHER; note = 2'-O-Methylguanosine
  modified_base 58: mod_base = OTHER; note = 2'-O-Methyluridine
  modified_base 59: mod_base = OTHER; note = 2'-O-Methylcytosine phosphorothioate
  modified_base 60: mod_base = OTHER; note = 2'-O-Methyladenosine phosphorothioate
  modified_base 61: mod_base = OTHER; note = 2'-O-Methylguanosine phosphorothioate
  modified_base 62: mod_base = OTHER; note = 2'-O-Methylcytosine phosphorothioate
  modified_base 63: mod_base = OTHER; note = 2'-O-Methyladenosine
  misc_feature 1..51: note = RNA
  misc_feature 52: note = DNA
  misc_feature 53: note = RNA
  misc_feature 54: note = DNA
  misc_feature 55..63: note = RNA

SEQ ID NO: 114 - DNA, 63 bp, synthetic construct; identical to SEQ ID NO: 111
  source 1..63: mol_type = other DNA; note = Description of Artificial Sequence: Synthetic oligonucleotide; note = Description of Combined DNA/RNA Molecule: Synthetic oligonucleotide
  modified_base 1: mod_base = OTHER; note = 2'-O-Methylguanosine phosphorothioate
  modified_base 2: mod_base = OTHER; note = 2'-O-Methyluridine phosphorothioate
  modified_base 3: mod_base = OTHER; note = 2'-O-Methylguanosine phosphorothioate
  modified_base 4: mod_base = OTHER; note = 2'-O-Methylguanosine phosphorothioate
  modified_base 5: mod_base = OTHER; note = 2'-O-Methyladenosine
  modified_base 6: mod_base = OTHER; note = 2'-O-Methyladenosine
  modified_base 7: mod_base = OTHER; note = 2'-O-Methyluridine
  modified_base 8: mod_base = OTHER; note = 2'-O-Methyladenosine
  modified_base 9: mod_base = OTHER; note = 2'-O-Methylguanosine
  modified_base 10: mod_base = OTHER; note = 2'-O-Methyluridine
  modified_base 11: mod_base = OTHER; note = 2'-O-Methyladenosine
  modified_base 12: mod_base = OTHER; note = 2'-O-Methyluridine
  modified_base 13: mod_base = OTHER; note = 2'-O-Methyladenosine
  modified_base 14: mod_base = OTHER; note = 2'-O-Methyladenosine
  modified_base 15: mod_base = OTHER; note = 2'-O-Methylcytosine
  modified_base 16: mod_base = OTHER; note = 2'-O-Methyladenosine
  modified_base 17: mod_base = OTHER; note = 2'-O-Methyladenosine
  modified_base 18: mod_base = OTHER; note = 2'-O-Methyluridine
  modified_base 19: mod_base = OTHER; note = 2'-O-Methyladenosine
  modified_base 20: mod_base = OTHER; note = 2'-O-Methyluridine
  modified_base 21: mod_base = OTHER; note = 2'-O-Methylguanosine
  modified_base 22: mod_base = OTHER; note = 2'-O-Methylcytosine
  modified_base 23: mod_base = OTHER; note = 2'-O-Methyluridine
  modified_base 24: mod_base = OTHER; note = 2'-O-Methyladenosine
  modified_base 25: mod_base = OTHER; note = 2'-O-Methyladenosine
  modified_base 26: mod_base = OTHER; note = 2'-O-Methyladenosine
  modified_base 27: mod_base = OTHER; note = 2'-O-Methyluridine
  modified_base 28: mod_base = OTHER; note = 2'-O-Methylguanosine
  modified_base 29: mod_base = OTHER; note = 2'-O-Methyluridine
  modified_base 30: mod_base = OTHER; note = 2'-O-Methyluridine
  modified_base 31: mod_base = OTHER; note = 2'-O-Methylguanosine
  modified_base 32: mod_base = OTHER; note = 2'-O-Methyluridine
  modified_base 33: mod_base = OTHER; note = 2'-O-Methyluridine
  modified_base 34: mod_base = OTHER; note = 2'-O-Methyladenosine
  modified_base 35: mod_base = OTHER; note = 2'-O-Methyluridine
  modified_base 36: mod_base = OTHER; note = 2'-O-Methyladenosine
  modified_base 37: mod_base = OTHER; note = 2'-O-Methylguanosine
  modified_base 38: mod_base = OTHER; note = 2'-O-Methyluridine
  modified_base 39: mod_base = OTHER; note = 2'-O-Methyladenosine
  modified_base 40: mod_base = OTHER; note = 2'-O-Methyluridine
  modified_base 41: mod_base = OTHER; note = 2'-O-Methylcytosine
  modified_base 42: mod_base = OTHER; note = 2'-O-Methylcytosine
  modified_base 43: mod_base = OTHER; note = 2'-O-Methylcytosine
  modified_base 44: mod_base = OTHER; note = 2'-O-Methyladenosine
  modified_base 45: mod_base = OTHER; note = 2'-O-Methylcytosine
  modified_base 46: mod_base = OTHER; note = 2'-O-Methylguanosine
  modified_base 47: mod_base = OTHER; note = 2'-O-Methylcytosine
  modified_base 48: mod_base = OTHER; note = 2'-O-Methyladenosine
  modified_base 49: mod_base = OTHER; note = 2'-O-Methyladenosine
  modified_base 50: mod_base = OTHER; note = 2'-O-Methyluridine
  modified_base 51: mod_base = OTHER; note = 2'-O-Methylguanosine
  modified_base 54: mod_base = OTHER; note = 2'-F-arabinose adenosine
  modified_base 55: mod_base = OTHER; note = 2'-O-Methyluridine
  modified_base 56: mod_base = OTHER; note = 2'-O-Methyladenosine
  modified_base 57: mod_base = OTHER; note = 2'-O-Methylguanosine
  modified_base 58: mod_base = OTHER; note = 2'-O-Methyluridine
  modified_base 59: mod_base = OTHER; note = 2'-O-Methylcytosine phosphorothioate
  modified_base 60: mod_base = OTHER; note = 2'-O-Methyladenosine phosphorothioate
  modified_base 61: mod_base = OTHER; note = 2'-O-Methylguanosine phosphorothioate
  modified_base 62: mod_base = OTHER; note = 2'-O-Methylcytosine phosphorothioate
  modified_base 63: mod_base = OTHER; note = 2'-O-Methyladenosine
  misc_feature 1..51: note = RNA
  misc_feature 52..53: note = DNA
  misc_feature 54..63: note = RNA

SEQ ID NO: 115 - DNA, 63 bp, synthetic construct; identical to SEQ ID NO: 111
  source 1..63: mol_type = other DNA; note = Description of Artificial Sequence: Synthetic oligonucleotide; note = Description of Combined DNA/RNA Molecule: Synthetic oligonucleotide
  modified_base 1: mod_base = OTHER; note = 2'-O-Methylguanosine phosphorothioate
  modified_base 2: mod_base = OTHER; note = 2'-O-Methyluridine phosphorothioate
  modified_base 3: mod_base = OTHER; note = 2'-O-Methylguanosine phosphorothioate
  modified_base 4: mod_base = OTHER; note = 2'-O-Methylguanosine phosphorothioate
  modified_base 5: mod_base = OTHER; note = 2'-O-Methyladenosine
  modified_base 6: mod_base = OTHER; note = 2'-O-Methyladenosine
  modified_base 7: mod_base = OTHER; note = 2'-O-Methyluridine
  modified_base 8: mod_base = OTHER; note = 2'-O-Methyladenosine
  modified_base 9: mod_base = OTHER; note = 2'-O-Methylguanosine
  modified_base 10: mod_base = OTHER; note = 2'-O-Methyluridine
  modified_base 11: mod_base = OTHER; note = 2'-O-Methyladenosine
  modified_base 12: mod_base = OTHER; note = 2'-O-Methyluridine
  modified_base 13: mod_base = OTHER; note = 2'-O-Methyladenosine
  modified_base 14: mod_base = OTHER; note = 2'-O-Methyladenosine
  modified_base 15: mod_base = OTHER; note = 2'-O-Methylcytosine
  modified_base 16: mod_base = OTHER; note = 2'-O-Methyladenosine
  modified_base 17: mod_base = OTHER; note = 2'-O-Methyladenosine
  modified_base 18: mod_base = OTHER; note = 2'-O-Methyluridine
  modified_base 19: mod_base = OTHER; note = 2'-O-Methyladenosine
  modified_base 20: mod_base = OTHER; note = 2'-O-Methyluridine
  modified_base 21: mod_base = OTHER; note = 2'-O-Methylguanosine
  modified_base 22: mod_base = OTHER; note = 2'-O-Methylcytosine
  modified_base 23: mod_base = OTHER; note = 2'-O-Methyluridine
  modified_base 24: mod_base = OTHER; note = 2'-O-Methyladenosine
  modified_base 25: mod_base = OTHER; note = 2'-O-Methyladenosine
  modified_base 26: mod_base = OTHER; note = 2'-O-Methyladenosine
  modified_base 27: mod_base = OTHER; note = 2'-O-Methyluridine
  modified_base 28: mod_base = OTHER; note = 2'-O-Methylguanosine
  modified_base 29: mod_base = OTHER; note = 2'-O-Methyluridine
  modified_base 30: mod_base = OTHER; note = 2'-O-Methyluridine
  modified_base 31: mod_base = OTHER; note = 2'-O-Methylguanosine
  modified_base 32: mod_base = OTHER; note = 2'-O-Methyluridine
  modified_base 33: mod_base = OTHER; note = 2'-O-Methyluridine
  modified_base 34: mod_base = OTHER; note = 2'-O-Methyladenosine
  modified_base 35: mod_base = OTHER; note = 2'-O-Methyluridine
  modified_base 36: mod_base = OTHER; note = 2'-O-Methyladenosine
  modified_base 37: mod_base = OTHER; note = 2'-O-Methylguanosine
  modified_base 38: mod_base = OTHER; note = 2'-O-Methyluridine
  modified_base 39: mod_base = OTHER; note = 2'-O-Methyladenosine
  modified_base 40: mod_base = OTHER; note = 2'-O-Methyluridine
  modified_base 41: mod_base = OTHER; note = 2'-O-Methylcytosine
  modified_base 42: mod_base = OTHER; note = 2'-O-Methylcytosine
  modified_base 43: mod_base = OTHER; note = 2'-O-Methylcytosine
  modified_base 44: mod_base = OTHER; note = 2'-O-Methyladenosine
  modified_base 45: mod_base = OTHER; note = 2'-O-Methylcytosine
  modified_base 46: mod_base = OTHER; note = 2'-O-Methylguanosine
  modified_base 47: mod_base = OTHER; note = 2'-O-Methylcytosine
  modified_base 48: mod_base = OTHER; note = 2'-O-Methyladenosine
  modified_base 49: mod_base = OTHER; note = 2'-O-Methyladenosine
  modified_base 50: mod_base = OTHER; note = 2'-O-Methyluridine
  modified_base 51: mod_base = OTHER; note = 2'-O-Methylguanosine
  modified_base 53: mod_base = OTHER; note = 2'-F-arabinose cytosine
  modified_base 54: mod_base = OTHER; note = 2'-F-arabinose adenosine
  modified_base 55: mod_base = OTHER; note = 2'-O-Methyluridine
  modified_base 56: mod_base = OTHER; note = 2'-O-Methyladenosine
  modified_base 57: mod_base = OTHER; note = 2'-O-Methylguanosine
  modified_base 58: mod_base = OTHER; note = 2'-O-Methyluridine
  modified_base 59: mod_base = OTHER; note = 2'-O-Methylcytosine phosphorothioate
  modified_base 60: mod_base = OTHER; note = 2'-O-Methyladenosine phosphorothioate
  modified_base 61: mod_base = OTHER; note = 2'-O-Methylguanosine phosphorothioate
  modified_base 62: mod_base = OTHER; note = 2'-O-Methylcytosine phosphorothioate
  modified_base 63: mod_base = OTHER; note = 2'-O-Methyladenosine
  misc_feature 1..51: note = RNA
  misc_feature 52: note = DNA
  misc_feature 53..63: note = RNA

SEQ ID NO: 116 - DNA, 63 bp, synthetic construct; identical to SEQ ID NO: 111
  source 1..63: mol_type = other DNA; note = Description of Artificial Sequence: Synthetic oligonucleotide; note = Description of Combined DNA/RNA Molecule: Synthetic oligonucleotide
  modified_base 1: mod_base = OTHER; note = 2'-O-Methylguanosine phosphorothioate
  modified_base 2: mod_base = OTHER; note = 2'-O-Methyluridine phosphorothioate
  modified_base 3: mod_base = OTHER; note = 2'-O-Methylguanosine phosphorothioate
  modified_base 4: mod_base = OTHER; note = 2'-O-Methylguanosine phosphorothioate
  modified_base 5: mod_base = OTHER; note = 2'-O-Methyladenosine
  modified_base 6: mod_base = OTHER; note = 2'-O-Methyladenosine
  modified_base 7: mod_base = OTHER; note = 2'-O-Methyluridine
  modified_base 8: mod_base = OTHER; note = 2'-O-Methyladenosine
  modified_base 9: mod_base = OTHER; note = 2'-O-Methylguanosine
  modified_base 10: mod_base = OTHER; note = 2'-O-Methyluridine
  modified_base 11: mod_base = OTHER; note = 2'-O-Methyladenosine
  modified_base 12: mod_base = OTHER; note = 2'-O-Methyluridine
  modified_base 13: mod_base = OTHER; note = 2'-O-Methyladenosine
  modified_base 14: mod_base = OTHER; note = 2'-O-Methyladenosine
  modified_base 15: mod_base = OTHER; note = 2'-O-Methylcytosine
  modified_base 16: mod_base = OTHER; note = 2'-O-Methyladenosine
  modified_base 17: mod_base = OTHER; note = 2'-O-Methyladenosine
  modified_base 18: mod_base = OTHER; note = 2'-O-Methyluridine
  modified_base 19: mod_base = OTHER; note = 2'-O-Methyladenosine
  modified_base 20: mod_base = OTHER; note = 2'-O-Methyluridine
  modified_base 21: mod_base = OTHER; note = 2'-O-Methylguanosine
  modified_base 22: mod_base = OTHER; note = 2'-O-Methylcytosine
  modified_base 23: mod_base = OTHER; note = 2'-O-Methyluridine
  modified_base 24: mod_base = OTHER; note = 2'-O-Methyladenosine
  modified_base 25: mod_base = OTHER; note = 2'-O-Methyladenosine
  modified_base 26: mod_base = OTHER; note = 2'-O-Methyladenosine
  modified_base 27: mod_base = OTHER; note = 2'-O-Methyluridine
  modified_base 28: mod_base = OTHER; note = 2'-O-Methylguanosine
  modified_base 29: mod_base = OTHER; note = 2'-O-Methyluridine
  modified_base 30: mod_base = OTHER; note = 2'-O-Methyluridine
  modified_base 31: mod_base = OTHER; note = 2'-O-Methylguanosine
  modified_base 32: mod_base = OTHER; note = 2'-O-Methyluridine
  modified_base 33: mod_base = OTHER; note = 2'-O-Methyluridine
  modified_base 34: mod_base = OTHER; note = 2'-O-Methyladenosine
  modified_base 35: mod_base = OTHER; note = 2'-O-Methyluridine
  modified_base 36: mod_base = OTHER; note = 2'-O-Methyladenosine
  modified_base 37: mod_base = OTHER; note = 2'-O-Methylguanosine
  modified_base 38: mod_base = OTHER; note = 2'-O-Methyluridine
  modified_base 39: mod_base = OTHER; note = 2'-O-Methyladenosine
  modified_base 40: mod_base = OTHER; note = 2'-O-Methyluridine
  modified_base 41: mod_base = OTHER; note = 2'-O-Methylcytosine
  modified_base 42: mod_base = OTHER; note = 2'-O-Methylcytosine
  modified_base 43: mod_base = OTHER; note = 2'-O-Methylcytosine
  modified_base 44: mod_base = OTHER; note = 2'-O-Methyladenosine
  modified_base 45: mod_base = OTHER; note = 2'-O-Methylcytosine
  modified_base 46: mod_base = OTHER; note = 2'-O-Methylguanosine
  modified_base 47: mod_base = OTHER; note = 2'-O-Methylcytosine
  modified_base 48: mod_base = OTHER; note = 2'-O-Methyladenosine
  modified_base 49: mod_base = OTHER; note = 2'-O-Methyladenosine
  modified_base 50: mod_base = OTHER; note = 2'-O-Methyluridine
  modified_base 51: mod_base = OTHER; note = 2'-O-Methylguanosine
  modified_base 52: mod_base = OTHER; note = 2'-F-arabinose cytosine
  modified_base 53: mod_base = OTHER; note = 2'-F-arabinose cytosine
  modified_base 55: mod_base = OTHER; note = 2'-O-Methyluridine
  modified_base 56: mod_base = OTHER; note = 2'-O-Methyladenosine
  modified_base 57: mod_base = OTHER; note = 2'-O-Methylguanosine
  modified_base 58: mod_base = OTHER; note = 2'-O-Methyluridine
  modified_base 59: mod_base = OTHER; note = 2'-O-Methylcytosine phosphorothioate
  modified_base 60: mod_base = OTHER; note = 2'-O-Methyladenosine phosphorothioate
  modified_base 61: mod_base = OTHER; note = 2'-O-Methylguanosine phosphorothioate
  modified_base 62: mod_base = OTHER; note = 2'-O-Methylcytosine phosphorothioate
  modified_base 63: mod_base = OTHER; note = 2'-O-Methyladenosine
  misc_feature 1..53: note = RNA
  misc_feature 54: note = DNA
  misc_feature 55..63: note = RNA

SEQ ID NO: 117 - RNA, 63 nt, synthetic construct
  source 1..63: mol_type = other RNA; note = Description of Artificial Sequence: Synthetic oligonucleotide
  modified_base 1: mod_base = OTHER; note = 2'-O-Methylguanosine phosphorothioate
  modified_base 2: mod_base = OTHER; note = 2'-O-Methyluridine phosphorothioate
  modified_base 3: mod_base = OTHER; note = 2'-O-Methylguanosine phosphorothioate
  modified_base 4: mod_base = OTHER; note = 2'-O-Methylguanosine phosphorothioate
  modified_base 5: mod_base = OTHER; note = 2'-O-Methyladenosine
  modified_base 6: mod_base = OTHER; note = 2'-O-Methyladenosine
  modified_base 7: mod_base = OTHER; note = 2'-O-Methyluridine
  modified_base 8: mod_base = OTHER; note = 2'-O-Methyladenosine
  modified_base 9: mod_base = OTHER; note = 2'-O-Methylguanosine
  modified_base 10: mod_base = OTHER; note = 2'-O-Methyluridine
  modified_base 11: mod_base = OTHER; note = 2'-O-Methyladenosine
  modified_base 12: mod_base = OTHER; note = 2'-O-Methyluridine
  modified_base 13: mod_base = OTHER; note = 2'-O-Methyladenosine
  modified_base 14: mod_base = OTHER; note = 2'-O-Methyladenosine
  modified_base 15: mod_base = OTHER; note = 2'-O-Methylcytosine
  modified_base 16: mod_base = OTHER; note = 2'-O-Methyladenosine
  modified_base 17: mod_base = OTHER; note = 2'-O-Methyladenosine
  modified_base 18: mod_base = OTHER; note = 2'-O-Methyluridine
  modified_base 19: mod_base = OTHER; note = 2'-O-Methyladenosine
  modified_base 20: mod_base = OTHER; note = 2'-O-Methyluridine
  modified_base 21: mod_base = OTHER; note = 2'-O-Methylguanosine
  modified_base 22: mod_base = OTHER; note = 2'-O-Methylcytosine
  modified_base 23: mod_base = OTHER; note = 2'-O-Methyluridine
  modified_base 24: mod_base = OTHER; note = 2'-O-Methyladenosine
  modified_base 25: mod_base = OTHER; note = 2'-O-Methyladenosine
  modified_base 26: mod_base = OTHER; note = 2'-O-Methyladenosine
  modified_base 27: mod_base = OTHER; note = 2'-O-Methyluridine
  modified_base 28: mod_base = OTHER; note = 2'-O-Methylguanosine
  modified_base 29: mod_base = OTHER; note = 2'-O-Methyluridine
  modified_base 30: mod_base = OTHER; note = 2'-O-Methyluridine
  modified_base 31: mod_base = OTHER; note = 2'-O-Methylguanosine
  modified_base 32: mod_base = OTHER; note = 2'-O-Methyluridine
  modified_base 33: mod_base = OTHER; note = 2'-O-Methyluridine
  modified_base 34: mod_base = OTHER; note = 2'-O-Methyladenosine
  modified_base 35: mod_base = OTHER; note = 2'-O-Methyluridine
  modified_base 36: mod_base = OTHER; note = 2'-O-Methyladenosine
  modified_base 37: mod_base = OTHER; note = 2'-O-Methylguanosine
  modified_base 38: mod_base = OTHER; note = 2'-O-Methyluridine
  modified_base 39: mod_base = OTHER; note = 2'-O-Methyladenosine
  modified_base 40: mod_base = OTHER; note = 2'-O-Methyluridine
  modified_base 41: mod_base = OTHER; note = 2'-O-Methylcytosine
  modified_base 42: mod_base = OTHER; note = 2'-O-Methylcytosine
  modified_base 43: mod_base = OTHER; note = 2'-O-Methylcytosine
  modified_base 44: mod_base = OTHER; note = 2'-O-Methyladenosine
  modified_base 45: mod_base = OTHER; note = 2'-O-Methylcytosine
  modified_base 46: mod_base = OTHER; note = 2'-O-Methylguanosine
  modified_base 47: mod_base = OTHER; note = 2'-O-Methylcytosine
  modified_base 48: mod_base = OTHER; note = 2'-O-Methyladenosine
  modified_base 49: mod_base = OTHER; note = 2'-O-Methyladenosine
  modified_base 50: mod_base = OTHER; note = 2'-O-Methyluridine
  modified_base 51: mod_base = OTHER; note = 2'-O-Methylguanosine
  modified_base 52: mod_base = OTHER; note = 2'-F-arabinose cytosine
  modified_base 53: mod_base = OTHER; note = 2'-F-arabinose cytosine
  modified_base 54: mod_base = OTHER; note = 2'-F-arabinose adenosine
  modified_base 55: mod_base = OTHER; note = 2'-O-Methyluridine
  modified_base 56: mod_base = OTHER; note = 2'-O-Methyladenosine
  modified_base 57: mod_base = OTHER; note = 2'-O-Methylguanosine
  modified_base 58: mod_base = OTHER; note = 2'-O-Methyluridine
  modified_base 59: mod_base = OTHER; note = 2'-O-Methylcytosine phosphorothioate
  modified_base 60: mod_base = OTHER; note = 2'-O-Methyladenosine phosphorothioate
  modified_base 61: mod_base = OTHER; note = 2'-O-Methylguanosine phosphorothioate
  modified_base 62: mod_base = OTHER; note = 2'-O-Methylcytosine phosphorothioate
  modified_base 63: mod_base = OTHER; note = 2'-O-Methyladenosine
gtggaatagtataacaatatgctaaatgttgttatagtatcccacgcaatgccatagtcagca

SEQ ID NO: 118 - DNA, 63 bp, synthetic construct; identical to SEQ ID NO: 111
  source 1..63: mol_type = other DNA; note = Description of Artificial Sequence: Synthetic oligonucleotide; note = Description of Combined DNA/RNA Molecule: Synthetic oligonucleotide
  modified_base 1: mod_base = OTHER; note = 2'-O-Methylguanosine phosphorothioate
  modified_base 2: mod_base = OTHER; note = 2'-O-Methyluridine phosphorothioate
  modified_base 3: mod_base = OTHER; note = 2'-O-Methylguanosine phosphorothioate
  modified_base 4: mod_base = OTHER; note = 2'-O-Methylguanosine phosphorothioate
  modified_base 5: mod_base = OTHER; note = 2'-O-Methyladenosine
  modified_base 6: mod_base = OTHER; note = 2'-O-Methyladenosine
  modified_base 7: mod_base = OTHER; note = 2'-O-Methyluridine
  modified_base 8: mod_base = OTHER; note = 2'-O-Methyladenosine
  modified_base 9: mod_base = OTHER; note = 2'-O-Methylguanosine
  modified_base 10: mod_base = OTHER; note = 2'-O-Methyluridine
  modified_base 11: mod_base = OTHER; note = 2'-O-Methyladenosine
  modified_base 12: mod_base = OTHER; note = 2'-O-Methyluridine
  modified_base 13: mod_base = OTHER; note = 2'-O-Methyladenosine
  modified_base 14: mod_base = OTHER; note = 2'-O-Methyladenosine
  modified_base 15: mod_base = OTHER; note = 2'-O-Methylcytosine
  modified_base 16: mod_base = OTHER; note = 2'-O-Methyladenosine
  modified_base 17: mod_base = OTHER; note = 2'-O-Methyladenosine
  modified_base 18: mod_base = OTHER; note = 2'-O-Methyluridine
  modified_base 19: mod_base = OTHER; note = 2'-O-Methyladenosine
  modified_base 20: mod_base = OTHER; note = 2'-O-Methyluridine
  modified_base 21: mod_base = OTHER; note = 2'-O-Methylguanosine
  modified_base 22: mod_base = OTHER; note = 2'-O-Methylcytosine
  modified_base 23: mod_base = OTHER; note = 2'-O-Methyluridine
  modified_base 24: mod_base = OTHER; note = 2'-O-Methyladenosine
  modified_base 25: mod_base = OTHER; note = 2'-O-Methyladenosine
  modified_base 26: mod_base = OTHER; note = 2'-O-Methyladenosine
  modified_base 27: mod_base = OTHER; note = 2'-O-Methyluridine
  modified_base 28: mod_base = OTHER; note = 2'-O-Methylguanosine
  modified_base 29: mod_base = OTHER; note = 2'-O-Methyluridine
  modified_base 30: mod_base = OTHER; note = 2'-O-Methyluridine
  modified_base 31: mod_base = OTHER; note = 2'-O-Methylguanosine
  modified_base 32: mod_base = OTHER; note = 2'-O-Methyluridine
  modified_base 33: mod_base = OTHER; note = 2'-O-Methyluridine
  modified_base 34: mod_base = OTHER; note = 2'-O-Methyladenosine
  modified_base 35: mod_base = OTHER; note = 2'-O-Methyluridine
  modified_base 36: mod_base = OTHER; note = 2'-O-Methyladenosine
  modified_base 37: mod_base = OTHER; note = 2'-O-Methylguanosine
  modified_base 38: mod_base = OTHER; note = 2'-O-Methyluridine
  modified_base 39: mod_base = OTHER; note = 2'-O-Methyladenosine
  modified_base 40: mod_base = OTHER; note = 2'-O-Methyluridine
  modified_base 41: mod_base = OTHER; note = 2'-O-Methylcytosine
  modified_base 42: mod_base = OTHER; note = 2'-O-Methylcytosine
  modified_base 43: mod_base = OTHER; note = 2'-O-Methylcytosine
  modified_base 44: mod_base = OTHER; note = 2'-O-Methyladenosine
  modified_base 45: mod_base = OTHER; note = 2'-O-Methylcytosine
  modified_base 46: mod_base = OTHER; note = 2'-O-Methylguanosine
  modified_base 47: mod_base = OTHER; note = 2'-O-Methylcytosine
  modified_base 48: mod_base = OTHER; note = 2'-O-Methyladenosine
  modified_base 49: mod_base = OTHER; note = 2'-O-Methyladenosine
  modified_base 50: mod_base = OTHER; note = 2'-O-Methyluridine
  modified_base 51: mod_base = OTHER; note = 2'-O-Methylguanosine
  modified_base 52: mod_base = OTHER; note = Cytosone arabinose
  modified_base 55: mod_base = OTHER; note = 2'-O-Methyluridine
  modified_base 56: mod_base = OTHER; note = 2'-O-Methyladenosine
  modified_base 57: mod_base = OTHER; note = 2'-O-Methylguanosine
  modified_base 58: mod_base = OTHER; note = 2'-O-Methyluridine
  modified_base 59: mod_base = OTHER; note = 2'-O-Methylcytosine phosphorothioate
  modified_base 60: mod_base = OTHER; note = 2'-O-Methyladenosine phosphorothioate
  modified_base 61: mod_base = OTHER; note = 2'-O-Methylguanosine phosphorothioate
  modified_base 62: mod_base = OTHER; note = 2'-O-Methylcytosine phosphorothioate
  modified_base 63: mod_base = OTHER; note = 2'-O-Methyladenosine
  misc_feature 1..52: note = RNA
  misc_feature 53..54: note = DNA
  misc_feature 55..63: note = RNA

SEQ ID NO: 119 - DNA, 63 bp, synthetic construct; identical to SEQ ID NO: 111
  source 1..63: mol_type = other DNA; note = Description of Artificial Sequence: Synthetic oligonucleotide; note = Description of Combined DNA/RNA Molecule: Synthetic oligonucleotide
  modified_base 1: mod_base = OTHER; note = 2'-O-Methylguanosine phosphorothioate
  modified_base 2: mod_base = OTHER; note = 2'-O-Methyluridine phosphorothioate
  modified_base 3: mod_base = OTHER; note = 2'-O-Methylguanosine phosphorothioate
  modified_base 4: mod_base = OTHER; note = 2'-O-Methylguanosine phosphorothioate
  modified_base 5: mod_base = OTHER; note = 2'-O-Methyladenosine
  modified_base 6: mod_base = OTHER; note = 2'-O-Methyladenosine
  modified_base 7: mod_base = OTHER; note = 2'-O-Methyluridine
  modified_base 8: mod_base = OTHER; note = 2'-O-Methyladenosine
  modified_base 9: mod_base = OTHER; note = 2'-O-Methylguanosine
  modified_base 10: mod_base = OTHER; note = 2'-O-Methyluridine
  modified_base 11: mod_base = OTHER; note = 2'-O-Methyladenosine
  modified_base 12: mod_base = OTHER; note = 2'-O-Methyluridine
  modified_base 13: mod_base = OTHER; note = 2'-O-Methyladenosine
  modified_base 14: mod_base = OTHER; note = 2'-O-Methyladenosine
  modified_base 15: mod_base = OTHER; note = 2'-O-Methylcytosine
  modified_base 16: mod_base = OTHER; note = 2'-O-Methyladenosine
  modified_base 17: mod_base = OTHER; note = 2'-O-Methyladenosine
  modified_base 18: mod_base = OTHER; note = 2'-O-Methyluridine
  modified_base 19: mod_base = OTHER; note = 2'-O-Methyladenosine
  modified_base 20: mod_base = OTHER; note = 2'-O-Methyluridine
  modified_base 21: mod_base = OTHER; note = 2'-O-Methylguanosine
  modified_base 22: mod_base = OTHER; note = 2'-O-Methylcytosine
  modified_base 23: mod_base = OTHER; note = 2'-O-Methyluridine
  modified_base 24: mod_base = OTHER; note = 2'-O-Methyladenosine
  modified_base 25: mod_base = OTHER; note = 2'-O-Methyladenosine
  modified_base 26: mod_base = OTHER; note = 2'-O-Methyladenosine
  modified_base 27: mod_base = OTHER; note = 2'-O-Methyluridine
  modified_base 28: mod_base = OTHER; note = 2'-O-Methylguanosine
  modified_base 29: mod_base = OTHER; note = 2'-O-Methyluridine
  modified_base 30: mod_base = OTHER; note = 2'-O-Methyluridine
  modified_base 31: mod_base = OTHER; note = 2'-O-Methylguanosine
  modified_base 32: mod_base = OTHER; note = 2'-O-Methyluridine
  modified_base 33: mod_base = OTHER; note = 2'-O-Methyluridine
  modified_base 34: mod_base = OTHER; note = 2'-O-Methyladenosine
  modified_base 35: mod_base = OTHER; note = 2'-O-Methyluridine
  modified_base 36: mod_base = OTHER; note = 2'-O-Methyladenosine
  modified_base 37: mod_base = OTHER; note = 2'-O-Methylguanosine
  modified_base 38: mod_base = OTHER; note = 2'-O-Methyluridine
  modified_base 39: mod_base = OTHER; note = 2'-O-Methyladenosine
  modified_base 40: mod_base = OTHER; note = 2'-O-Methyluridine
  modified_base 41: mod_base = OTHER; note = 2'-O-Methylcytosine
  modified_base 42: mod_base = OTHER; note = 2'-O-Methylcytosine
  modified_base 43: mod_base = OTHER; note = 2'-O-Methylcytosine
  modified_base 44: mod_base = OTHER; note = 2'-O-Methyladenosine
  modified_base 45: mod_base = OTHER; note = 2'-O-Methylcytosine
  modified_base 46: mod_base = OTHER; note = 2'-O-Methylguanosine
  modified_base 47: mod_base = OTHER; note = 2'-O-Methylcytosine
  modified_base 48: mod_base = OTHER; note = 2'-O-Methyladenosine
  modified_base 49: mod_base = OTHER; note = 2'-O-Methyladenosine
  modified_base 50: mod_base = OTHER; note = 2'-O-Methyluridine
  modified_base 51: mod_base = OTHER; note = 2'-O-Methylguanosine
  modified_base 53: mod_base = OTHER; note = Cytosone arabinose
  modified_base 55: mod_base = OTHER; note = 2'-O-Methyluridine
  modified_base 56: mod_base = OTHER; note = 2'-O-Methyladenosine
  modified_base 57: mod_base = OTHER; note = 2'-O-Methylguanosine
  modified_base 58: mod_base = OTHER; note = 2'-O-Methyluridine
  modified_base 59: mod_base = OTHER; note = 2'-O-Methylcytosine phosphorothioate
  modified_base 60: mod_base = OTHER; note = 2'-O-Methyladenosine phosphorothioate
  modified_base 61: mod_base = OTHER; note = 2'-O-Methylguanosine phosphorothioate
  modified_base 62: mod_base = OTHER; note = 2'-O-Methylcytosine phosphorothioate
  modified_base 63: mod_base = OTHER; note = 2'-O-Methyladenosine
  misc_feature 1..51: note = RNA
  misc_feature 52: note = DNA
  misc_feature 53: note = RNA
  misc_feature 54: note = DNA
  misc_feature 55..63: note = RNA

SEQ ID NO: 120 - DNA, 63 bp, synthetic construct; identical to SEQ ID NO: 111
  source 1..63: mol_type = other DNA; note = Description of Artificial Sequence: Synthetic oligonucleotide; note = Description of Combined DNA/RNA Molecule: Synthetic oligonucleotide
  modified_base 1: mod_base = OTHER; note = 2'-O-Methylguanosine phosphorothioate
  modified_base 2: mod_base = OTHER; note = 2'-O-Methyluridine phosphorothioate
  modified_base 3: mod_base = OTHER; note = 2'-O-Methylguanosine phosphorothioate
  modified_base 4: mod_base = OTHER; note = 2'-O-Methylguanosine phosphorothioate
  modified_base 5: mod_base = OTHER; note = 2'-O-Methyladenosine
  modified_base 6: mod_base = OTHER; note = 2'-O-Methyladenosine
  modified_base 7: mod_base = OTHER; note = 2'-O-Methyluridine
  modified_base 8: mod_base = OTHER; note = 2'-O-Methyladenosine
  modified_base 9: mod_base = OTHER; note = 2'-O-Methylguanosine
  modified_base 10: mod_base = OTHER; note = 2'-O-Methyluridine
  modified_base 11: mod_base = OTHER; note = 2'-O-Methyladenosine
  modified_base 12: mod_base = OTHER; note = 2'-O-Methyluridine
  modified_base 13: mod_base = OTHER; note = 2'-O-Methyladenosine
  modified_base 14: mod_base = OTHER; note = 2'-O-Methyladenosine
  modified_base 15: mod_base = OTHER; note = 2'-O-Methylcytosine
  modified_base 16: mod_base = OTHER; note = 2'-O-Methyladenosine
  modified_base 17: mod_base = OTHER; note = 2'-O-Methyladenosine
  modified_base 18: mod_base = OTHER; note = 2'-O-Methyluridine
  modified_base 19: mod_base = OTHER; note = 2'-O-Methyladenosine
  modified_base 20: mod_base = OTHER; note = 2'-O-Methyluridine
  modified_base 21: mod_base = OTHER; note = 2'-O-Methylguanosine
  modified_base 22: mod_base = OTHER; note = 2'-O-Methylcytosine
  modified_base 23: mod_base = OTHER; note = 2'-O-Methyluridine
  modified_base 24: mod_base = OTHER; note = 2'-O-Methyladenosine
  modified_base 25: mod_base = OTHER; note = 2'-O-Methyladenosine
  modified_base 26: mod_base = OTHER; note = 2'-O-Methyladenosine
  modified_base 27: mod_base = OTHER; note = 2'-O-Methyluridine
  modified_base 28: mod_base = OTHER; note = 2'-O-Methylguanosine
  modified_base 29: mod_base = OTHER; note = 2'-O-Methyluridine
  modified_base 30: mod_base = OTHER; note = 2'-O-Methyluridine
  modified_base 31: mod_base = OTHER; note = 2'-O-Methylguanosine
  modified_base 32: mod_base = OTHER; note = 2'-O-Methyluridine
  modified_base 33: mod_base = OTHER; note = 2'-O-Methyluridine
  modified_base 34: mod_base = OTHER; note = 2'-O-Methyladenosine
  modified_base 35: mod_base = OTHER; note = 2'-O-Methyluridine
  modified_base 36: mod_base = OTHER; note = 2'-O-Methyladenosine
  modified_base 37: mod_base = OTHER; note = 2'-O-Methylguanosine
  modified_base 38: mod_base = OTHER; note = 2'-O-Methyluridine
  modified_base 39: mod_base = OTHER; note = 2'-O-Methyladenosine
  modified_base 40: mod_base = OTHER; note = 2'-O-Methyluridine
  modified_base 41: mod_base = OTHER; note = 2'-O-Methylcytosine
  modified_base 42: mod_base = OTHER; note = 2'-O-Methylcytosine
  modified_base 43: mod_base = OTHER; note = 2'-O-Methylcytosine
  modified_base 44: mod_base = OTHER; note = 2'-O-Methyladenosine
  modified_base 45: mod_base = OTHER; note = 2'-O-Methylcytosine
  modified_base 46: mod_base = OTHER; note = 2'-O-Methylguanosine
  modified_base 47: mod_base = OTHER; note = 2'-O-Methylcytosine
  modified_base 48: mod_base = OTHER; note = 2'-O-Methyladenosine
  modified_base 49: mod_base = OTHER; note = 2'-O-Methyladenosine
  modified_base 50: mod_base = OTHER; note = 2'-O-Methyluridine
  modified_base 51: mod_base = OTHER; note = 2'-O-Methylguanosine
  modified_base 54: mod_base = OTHER; note = Adenosine arabinose
  modified_base 55: mod_base = OTHER; note = 2'-O-Methyluridine
  modified_base 56: mod_base = OTHER; note = 2'-O-Methyladenosine
  modified_base 57: mod_base = OTHER; note = 2'-O-Methylguanosine
  modified_base 58: mod_base = OTHER; note = 2'-O-Methyluridine
  modified_base 59: mod_base = OTHER; note = 2'-O-Methylcytosine phosphorothioate
  modified_base 60: mod_base = OTHER; note = 2'-O-Methyladenosine phosphorothioate
  modified_base 61: mod_base = OTHER; note = 2'-O-Methylguanosine phosphorothioate
  modified_base 62: mod_base = OTHER; note = 2'-O-Methylcytosine phosphorothioate
  modified_base 63: mod_base = OTHER; note = 2'-O-Methyladenosine
  misc_feature 1..51: note = RNA
  misc_feature 52..53: note = DNA
  misc_feature 54..63: note = RNA

SEQ ID NO: 121 - RNA, 63 nt, synthetic construct; identical to SEQ ID NO: 117
  source 1..63: mol_type = other RNA; note = Description of Artificial Sequence: Synthetic oligonucleotide
  modified_base 1: mod_base = OTHER; note = 2'-O-Methylguanosine phosphorothioate
  modified_base 2: mod_base = OTHER; note = 2'-O-Methyluridine phosphorothioate
  modified_base 3: mod_base = OTHER; note = 2'-O-Methylguanosine phosphorothioate
  modified_base 4: mod_base = OTHER; note = 2'-O-Methylguanosine phosphorothioate
  modified_base 5: mod_base = OTHER; note = 2'-O-Methyladenosine
  modified_base 6: mod_base = OTHER; note = 2'-O-Methyladenosine
  modified_base 7: mod_base = OTHER; note = 2'-O-Methyluridine
  modified_base 8: mod_base = OTHER; note = 2'-O-Methyladenosine
  modified_base 9: mod_base = OTHER; note = 2'-O-Methylguanosine
  modified_base 10: mod_base = OTHER; note = 2'-O-Methyluridine
  modified_base 11: mod_base = OTHER; note = 2'-O-Methyladenosine
  modified_base 12: mod_base = OTHER; note = 2'-O-Methyluridine
  modified_base 13: mod_base = OTHER; note = 2'-O-Methyladenosine
  modified_base 14: mod_base = OTHER; note = 2'-O-Methyladenosine
  modified_base 15: mod_base = OTHER; note = 2'-O-Methylcytosine
  modified_base 16: mod_base = OTHER; note = 2'-O-Methyladenosine
  modified_base 17: mod_base = OTHER; note = 2'-O-Methyladenosine
  modified_base 18: mod_base = OTHER; note = 2'-O-Methyluridine
  modified_base 19: mod_base = OTHER; note = 2'-O-Methyladenosine
  modified_base 20: mod_base = OTHER; note = 2'-O-Methyluridine
  modified_base 21: mod_base = OTHER; note = 2'-O-Methylguanosine
  modified_base 22: mod_base = OTHER; note = 2'-O-Methylcytosine
  modified_base 23: mod_base = OTHER; note = 2'-O-Methyluridine
  modified_base 24: mod_base = OTHER; note = 2'-O-Methyladenosine
  modified_base 25: mod_base = OTHER; note = 2'-O-Methyladenosine
  modified_base 26: mod_base = OTHER; note = 2'-O-Methyladenosine
  modified_base 27: mod_base = OTHER; note = 2'-O-Methyluridine
  modified_base 28: mod_base = OTHER; note = 2'-O-Methylguanosine
  modified_base 29: mod_base = OTHER; note = 2'-O-Methyluridine
  modified_base 30: mod_base = OTHER; note = 2'-O-Methyluridine
  modified_base 31: mod_base = OTHER; note = 2'-O-Methylguanosine
  modified_base 32: mod_base = OTHER; note = 2'-O-Methyluridine
  modified_base 33: mod_base = OTHER; note = 2'-O-Methyluridine
  modified_base 34: mod_base = OTHER; note = 2'-O-Methyladenosine
  modified_base 35: mod_base = OTHER; note = 2'-O-Methyluridine
  modified_base 36: mod_base = OTHER; note = 2'-O-Methyladenosine
  modified_base 37: mod_base = OTHER; note = 2'-O-Methylguanosine
  modified_base 38: mod_base = OTHER; note = 2'-O-Methyluridine
  modified_base 39: mod_base = OTHER; note = 2'-O-Methyladenosine
  modified_base 40: mod_base = OTHER; note = 2'-O-Methyluridine
  modified_base 41: mod_base = OTHER; note = 2'-O-Methylcytosine
  modified_base 42: mod_base = OTHER; note = 2'-O-Methylcytosine
  modified_base 43: mod_base = OTHER; note = 2'-O-Methylcytosine
  modified_base 44: mod_base = OTHER; note = 2'-O-Methyladenosine
  modified_base 45: mod_base = OTHER; note = 2'-O-Methylcytosine
  modified_base 46: mod_base = OTHER; note = 2'-O-Methylguanosine
  modified_base 47: mod_base = OTHER; note = 2'-O-Methylcytosine
  modified_base 48: mod_base = OTHER; note = 2'-O-Methyladenosine
  modified_base 49: mod_base = OTHER; note = 2'-O-Methyladenosine
  modified_base 50: mod_base = OTHER; note = 2'-O-Methyluridine
  modified_base 51: mod_base = OTHER; note = 2'-O-Methylguanosine
  modified_base 52: mod_base = OTHER; note = Cytosone arabinose
  modified_base 53: mod_base = OTHER; note = Cytosone arabinose
  modified_base 54: mod_base = OTHER; note = Adenosine arabinose
  modified_base 55: mod_base = OTHER; note = 2'-O-Methyluridine
  modified_base 56: mod_base = OTHER; note = 2'-O-Methyladenosine
  modified_base 57: mod_base = OTHER; note = 2'-O-Methylguanosine
  modified_base 58: mod_base = OTHER; note = 2'-O-Methyluridine
  modified_base 59: mod_base = OTHER; note = 2'-O-Methylcytosine phosphorothioate
  modified_base 60: mod_base = OTHER; note = 2'-O-Methyladenosine phosphorothioate
  modified_base 61: mod_base = OTHER; note = 2'-O-Methylguanosine phosphorothioate
  modified_base 62: mod_base = OTHER; note = 2'-O-Methylcytosine phosphorothioate
  modified_base 63: mod_base = OTHER; note = 2'-O-Methyladenosine

SEQ ID NO: 122 - DNA, 63 bp, synthetic construct; identical to SEQ ID NO: 111
  source 1..63: mol_type = other DNA; note = Description of Artificial Sequence: Synthetic oligonucleotide; note = Description of Combined DNA/RNA Molecule: Synthetic oligonucleotide
  modified_base 1: mod_base = OTHER; note = 2'-O-Methylguanosine phosphorothioate
  modified_base 2: mod_base = OTHER; note = 2'-O-Methyluridine phosphorothioate
  modified_base 3: mod_base = OTHER; note = 2'-O-Methylguanosine phosphorothioate
  modified_base 4: mod_base = OTHER; note = 2'-O-Methylguanosine phosphorothioate
  modified_base 5: mod_base = OTHER; note = 2'-O-Methyladenosine
  modified_base 6: mod_base = OTHER; note = 2'-O-Methyladenosine
  modified_base 7: mod_base = OTHER; note = 2'-O-Methyluridine
  modified_base 8: mod_base = OTHER; note = 2'-O-Methyladenosine
  modified_base 9: mod_base = OTHER; note = 2'-O-Methylguanosine
  modified_base 10: mod_base = OTHER; note = 2'-O-Methyluridine
  modified_base 11: mod_base = OTHER; note = 2'-O-Methyladenosine
  modified_base 12: mod_base = OTHER; note = 2'-O-Methyluridine
  modified_base 13: mod_base = OTHER; note = 2'-O-Methyladenosine
  modified_base 14: mod_base = OTHER; note = 2'-O-Methyladenosine
  modified_base 15: mod_base = OTHER; note = 2'-O-Methylcytosine
  modified_base 16: mod_base = OTHER; note = 2'-O-Methyladenosine
  modified_base 17: mod_base = OTHER; note = 2'-O-Methyladenosine
  modified_base 18: mod_base = OTHER; note = 2'-O-Methyluridine
  modified_base 19: mod_base = OTHER; note = 2'-O-Methyladenosine
  modified_base 20: mod_base = OTHER; note = 2'-O-Methyluridine
  modified_base 21: mod_base = OTHER; note = 2'-O-Methylguanosine
  modified_base 22: mod_base = OTHER; note = 2'-O-Methylcytosine
  modified_base 23: mod_base = OTHER; note = 2'-O-Methyluridine
  modified_base 24: mod_base = OTHER; note = 2'-O-Methyladenosine
  modified_base 25: mod_base = OTHER; note = 2'-O-Methyladenosine
  modified_base 26: mod_base = OTHER; note = 2'-O-Methyladenosine
  modified_base 27: mod_base = OTHER; note = 2'-O-Methyluridine
  modified_base 28: mod_base = OTHER; note = 2'-O-Methylguanosine
  modified_base 29: mod_base = OTHER; note = 2'-O-Methyluridine
  modified_base 30: mod_base = OTHER; note = 2'-O-Methyluridine
  modified_base 31: mod_base = OTHER; note = 2'-O-Methylguanosine
  modified_base 32: mod_base = OTHER; note = 2'-O-Methyluridine
  modified_base 33: mod_base = OTHER; note = 2'-O-Methyluridine
  modified_base 34: mod_base = OTHER; note = 2'-O-Methyladenosine
  modified_base 35: mod_base = OTHER; note = 2'-O-Methyluridine
  modified_base 36: mod_base = OTHER; note = 2'-O-Methyladenosine
  modified_base 37: mod_base = OTHER; note = 2'-O-Methylguanosine
  modified_base 38: mod_base = OTHER; note = 2'-O-Methyluridine
  modified_base 39: mod_base = OTHER; note = 2'-O-Methyladenosine
  modified_base 40: mod_base = OTHER; note = 2'-O-Methyluridine
  modified_base 41: mod_base = OTHER; note = 2'-O-Methylcytosine
  modified_base 42: mod_base = OTHER; note = 2'-O-Methylcytosine
  modified_base 43: mod_base = OTHER; note = 2'-O-Methylcytosine
  modified_base 44: mod_base = OTHER; note = 2'-O-Methyladenosine
  modified_base 45: mod_base = OTHER; note = 2'-O-Methylcytosine
  modified_base 46: mod_base = OTHER; note = 2'-O-Methylguanosine
  modified_base 47: mod_base = OTHER; note = 2'-O-Methylcytosine
  modified_base 48: mod_base = OTHER; note = 2'-O-Methyladenosine
  modified_base 49: mod_base = OTHER; note = 2'-O-Methyladenosine
  modified_base 50: mod_base = OTHER; note = 2'-O-Methyluridine
  modified_base 51: mod_base = OTHER; note = 2'-O-Methylguanosine
  modified_base 52: mod_base = OTHER; note = 2'-O-Methylcytosine Arabinose
  modified_base 55: mod_base = OTHER; note = 2'-O-Methyluridine
  modified_base 56: mod_base = OTHER; note = 2'-O-Methyladenosine
  modified_base 57: mod_base = OTHER; note = 2'-O-Methylguanosine
  modified_base 58: mod_base = OTHER; note = 2'-O-Methyluridine
  modified_base 59: mod_base = OTHER; note = 2'-O-Methylcytosine phosphorothioate
  modified_base 60: mod_base = OTHER; note = 2'-O-Methyladenosine phosphorothioate
  modified_base 61: mod_base = OTHER; note = 2'-O-Methylguanosine phosphorothioate
  modified_base 62: mod_base = OTHER; note = 2'-O-Methylcytosine phosphorothioate
  modified_base 63: mod_base = OTHER; note = 2'-O-Methyladenosine
  misc_feature 1..52: note = RNA
  misc_feature 53..54: note = DNA
  misc_feature 55..63: note = RNA

SEQ ID NO: 123 - DNA, 63 bp, synthetic construct; identical to SEQ ID NO: 111
  source 1..63: mol_type = other DNA; note = Description of Artificial Sequence: Synthetic oligonucleotide; note = Description of Combined DNA/RNA Molecule: Synthetic oligonucleotide
  modified_base 1: mod_base = OTHER; note = 2'-O-Methylguanosine phosphorothioate
  modified_base 2: mod_base = OTHER; note = 2'-O-Methyluridine phosphorothioate
  modified_base 3: mod_base = OTHER; note = 2'-O-Methylguanosine phosphorothioate
  modified_base 4: mod_base = OTHER; note = 2'-O-Methylguanosine phosphorothioate
  modified_base 5: mod_base = OTHER; note = 2'-O-Methyladenosine
  modified_base 6: mod_base = OTHER; note = 2'-O-Methyladenosine
  modified_base 7: mod_base = OTHER; note = 2'-O-Methyluridine
  modified_base 8: mod_base = OTHER; note = 2'-O-Methyladenosine
  modified_base 9: mod_base = OTHER; note = 2'-O-Methylguanosine
  modified_base 10: mod_base = OTHER; note = 2'-O-Methyluridine
  modified_base 11: mod_base = OTHER; note = 2'-O-Methyladenosine
  modified_base 12: mod_base = OTHER; note = 2'-O-Methyluridine
  modified_base 13: mod_base = OTHER; note = 2'-O-Methyladenosine
  modified_base 14: mod_base = OTHER; note = 2'-O-Methyladenosine
  modified_base 15: mod_base = OTHER; note = 2'-O-Methylcytosine
  modified_base 16: mod_base = OTHER; note = 2'-O-Methyladenosine
  modified_base 17: mod_base = OTHER; note = 2'-O-Methyladenosine
  modified_base 18: mod_base = OTHER; note = 2'-O-Methyluridine
  modified_base 19: mod_base = OTHER; note = 2'-O-Methyladenosine
  modified_base 20: mod_base = OTHER; note = 2'-O-Methyluridine
  modified_base 21: mod_base = OTHER; note = 2'-O-Methylguanosine
  modified_base 22: mod_base = OTHER; note = 2'-O-Methylcytosine
  modified_base 23: mod_base = OTHER; note = 2'-O-Methyluridine
  modified_base 24: mod_base = OTHER; note = 2'-O-Methyladenosine
  modified_base 25: mod_base = OTHER; note = 2'-O-Methyladenosine
  modified_base 26: mod_base = OTHER; note = 2'-O-Methyladenosine
  modified_base 27: mod_base = OTHER; note = 2'-O-Methyluridine
  modified_base 28: mod_base = OTHER; note = 2'-O-Methylguanosine
  modified_base 29: mod_base = OTHER; note = 2'-O-Methyluridine
  modified_base 30: mod_base = OTHER; note = 2'-O-Methyluridine
  modified_base 31: mod_base = OTHER; note = 2'-O-Methylguanosine
  modified_base 32: mod_base = OTHER; note = 2'-O-Methyluridine
  modified_base 33: mod_base = OTHER; note = 2'-O-Methyluridine
  modified_base 34: mod_base = OTHER; note = 2'-O-Methyladenosine
  modified_base 35: mod_base = OTHER; note = 2'-O-Methyluridine
  modified_base 36: mod_base = OTHER; note = 2'-O-Methyladenosine
  modified_base 37: mod_base = OTHER; note = 2'-O-Methylguanosine
  modified_base 38: mod_base = OTHER; note = 2'-O-Methyluridine
  modified_base 39: mod_base = OTHER; note = 2'-O-Methyladenosine
  modified_base 40: mod_base = OTHER; note = 2'-O-Methyluridine
  modified_base 41: mod_base = OTHER; note = 2'-O-Methylcytosine
  modified_base 42: mod_base = OTHER; note = 2'-O-Methylcytosine
  modified_base 43: mod_base = OTHER; note = 2'-O-Methylcytosine
  modified_base 44: mod_base = OTHER; note = 2'-O-Methyladenosine
  modified_base 45: mod_base = OTHER; note = 2'-O-Methylcytosine
  modified_base 46: mod_base = OTHER; note = 2'-O-Methylguanosine
  modified_base 47: mod_base = OTHER; note = 2'-O-Methylcytosine
  modified_base 48: mod_base = OTHER; note = 2'-O-Methyladenosine
  modified_base 49: mod_base = OTHER; note = 2'-O-Methyladenosine
  modified_base 50: mod_base = OTHER; note = 2'-O-Methyluridine
  modified_base 51: mod_base = OTHER; note = 2'-O-Methylguanosine
  modified_base 53: mod_base = OTHER; note = 2'-O-Methylcytosine Arabinose
  modified_base 55: mod_base = OTHER; note = 2'-O-Methyluridine
  modified_base 56: mod_base = OTHER; note = 2'-O-Methyladenosine
  modified_base 57: mod_base = OTHER; note = 2'-O-Methylguanosine
  modified_base 58: mod_base = OTHER; note = 2'-O-Methyluridine
  modified_base 59: mod_base = OTHER; note = 2'-O-Methylcytosine phosphorothioate
  modified_base 60: mod_base = OTHER; note = 2'-O-Methyladenosine phosphorothioate
  modified_base 61: mod_base = OTHER; note = 2'-O-Methylguanosine phosphorothioate
  modified_base 62: mod_base = OTHER; note = 2'-O-Methylcytosine phosphorothioate
  modified_base 63: mod_base = OTHER; note = 2'-O-Methyladenosine
  misc_feature 1..51: note = RNA
  misc_feature 52: note = DNA
  misc_feature 53: note = RNA
  misc_feature 54: note = DNA
  misc_feature 55..63: note = RNA

SEQ ID NO: 124 - DNA, 63 bp, synthetic construct; identical to SEQ ID NO: 111
  source 1..63: mol_type = other DNA; note = Description of Artificial Sequence: Synthetic oligonucleotide; note = Description of Combined DNA/RNA Molecule: Synthetic oligonucleotide
  modified_base 1: mod_base = OTHER; note = 2'-O-Methylguanosine phosphorothioate
  modified_base 2: mod_base = OTHER; note = 2'-O-Methyluridine phosphorothioate
  modified_base 3: mod_base = OTHER; note = 2'-O-Methylguanosine phosphorothioate
  modified_base 4: mod_base = OTHER; note = 2'-O-Methylguanosine phosphorothioate
  modified_base 5: mod_base = OTHER; note = 2'-O-Methyladenosine
  modified_base 6: mod_base = OTHER; note = 2'-O-Methyladenosine
  modified_base 7: mod_base = OTHER; note = 2'-O-Methyluridine
  modified_base 8: mod_base = OTHER; note = 2'-O-Methyladenosine
  modified_base 9: mod_base = OTHER; note = 2'-O-Methylguanosine
  modified_base 10: mod_base = OTHER; note = 2'-O-Methyluridine
  modified_base 11: mod_base = OTHER; note = 2'-O-Methyladenosine
  modified_base 12: mod_base = OTHER; note = 2'-O-Methyluridine
  modified_base 13: mod_base = OTHER; note = 2'-O-Methyladenosine
  modified_base 14: mod_base = OTHER; note = 2'-O-Methyladenosine
  modified_base 15: mod_base = OTHER; note = 2'-O-Methylcytosine
  modified_base 16: mod_base = OTHER; note = 2'-O-Methyladenosine
  modified_base 17: mod_base = OTHER; note = 2'-O-Methyladenosine
  modified_base 18: mod_base = OTHER; note = 2'-O-Methyluridine
  modified_base 19: mod_base = OTHER; note = 2'-O-Methyladenosine
  modified_base 20: mod_base = OTHER; note = 2'-O-Methyluridine
  modified_base 21: mod_base = OTHER; note = 2'-O-Methylguanosine
  modified_base 22: mod_base = OTHER; note = 2'-O-Methylcytosine
  modified_base 23: mod_base = OTHER; note = 2'-O-Methyluridine
  modified_base 24: mod_base = OTHER; note = 2'-O-Methyladenosine
  modified_base 25: mod_base = OTHER; note = 2'-O-Methyladenosine
  modified_base 26: mod_base = OTHER; note = 2'-O-Methyladenosine
  modified_base 27: mod_base = OTHER; note = 2'-O-Methyluridine
  modified_base 28: mod_base = OTHER; note = 2'-O-Methylguanosine
  modified_base 29: mod_base = OTHER; note = 2'-O-Methyluridine
  modified_base 30: mod_base = OTHER; note = 2'-O-Methyluridine
  modified_base 31: mod_base = OTHER; note = 2'-O-Methylguanosine
  modified_base 32: mod_base = OTHER; note = 2'-O-Methyluridine
  modified_base 33: mod_base = OTHER; note = 2'-O-Methyluridine
  modified_base 34: mod_base = OTHER; note = 2'-O-Methyladenosine
  modified_base 35: mod_base = OTHER; note = 2'-O-Methyluridine
  modified_base 36: mod_base = OTHER; note = 2'-O-Methyladenosine
  modified_base 37: mod_base = OTHER; note = 2'-O-Methylguanosine
  modified_base 38: mod_base = OTHER; note = 2'-O-Methyluridine
  modified_base 39: mod_base = OTHER; note = 2'-O-Methyladenosine
  modified_base 40: mod_base = OTHER; note = 2'-O-Methyluridine
  modified_base 41: mod_base = OTHER; note = 2'-O-Methylcytosine
  modified_base 42: mod_base = OTHER; note = 2'-O-Methylcytosine
  modified_base 43: mod_base = OTHER; note = 2'-O-Methylcytosine
  modified_base 44: mod_base = OTHER; note = 2'-O-Methyladenosine
  modified_base 45: mod_base = OTHER; note = 2'-O-Methylcytosine
  modified_base 46: mod_base = OTHER; note = 2'-O-Methylguanosine
  modified_base 47: mod_base = OTHER; note = 2'-O-Methylcytosine
  modified_base 48: mod_base = OTHER; note = 2'-O-Methyladenosine
  modified_base 49: mod_base = OTHER; note = 2'-O-Methyladenosine
  modified_base 50: mod_base = OTHER; note = 2'-O-Methyluridine
  modified_base 51: mod_base = OTHER; note = 2'-O-Methylguanosine
  modified_base 54: mod_base = OTHER; note = 2'-O-Methyladenosine Arabinose
  modified_base 55: mod_base = OTHER; note = 2'-O-Methyluridine
  modified_base 56: mod_base = OTHER; note = 2'-O-Methyladenosine
  modified_base 57: mod_base = OTHER; note = 2'-O-Methylguanosine
  modified_base 58: mod_base = OTHER; note = 2'-O-Methyluridine
  modified_base 59: mod_base = OTHER; note = 2'-O-Methylcytosine phosphorothioate
  modified_base 60: mod_base = OTHER; note = 2'-O-Methyladenosine phosphorothioate
  modified_base 61: mod_base = OTHER; note = 2'-O-Methylguanosine phosphorothioate
  modified_base 62: mod_base = OTHER; note = 2'-O-Methylcytosine phosphorothioate
  modified_base 63: mod_base = OTHER; note = 2'-O-Methyladenosine
  misc_feature 1..51: note = RNA
  misc_feature 52..53: note = DNA
  misc_feature 54..63: note = RNA

SEQ ID NO: 125 - DNA, 63 bp, synthetic construct; identical to SEQ ID NO: 111
  source 1..63: mol_type = other DNA; note = Description of Artificial Sequence: Synthetic oligonucleotide; note = Description of Combined DNA/RNA Molecule: Synthetic oligonucleotide
  modified_base 1: mod_base = OTHER; note = 2'-O-Methylguanosine phosphorothioate
  modified_base 2: mod_base = OTHER; note = 2'-O-Methyluridine phosphorothioate
  modified_base 3: mod_base = OTHER; note = 2'-O-Methylguanosine phosphorothioate
  modified_base 4: mod_base = OTHER; note = 2'-O-Methylguanosine phosphorothioate
  modified_base 5: mod_base = OTHER; note = 2'-O-Methyladenosine
  modified_base 6: mod_base = OTHER; note = 2'-O-Methyladenosine
  modified_base 7: mod_base = OTHER; note = 2'-O-Methyluridine
  modified_base 8: mod_base = OTHER; note = 2'-O-Methyladenosine
  modified_base 9: mod_base = OTHER; note = 2'-O-Methylguanosine
  modified_base 10: mod_base = OTHER; note = 2'-O-Methyluridine
  modified_base 11: mod_base = OTHER; note = 2'-O-Methyladenosine
  modified_base 12: mod_base = OTHER; note = 2'-O-Methyluridine
  modified_base 13: mod_base = OTHER; note = 2'-O-Methyladenosine
  modified_base 14: mod_base = OTHER; note = 2'-O-Methyladenosine
  modified_base 15: mod_base = OTHER; note = 2'-O-Methylcytosine
  modified_base 16: mod_base = OTHER; note = 2'-O-Methyladenosine
  modified_base 17: mod_base = OTHER; note = 2'-O-Methyladenosine
  modified_base 18: mod_base = OTHER; note = 2'-O-Methyluridine
  modified_base 19: mod_base = OTHER; note = 2'-O-Methyladenosine
  modified_base 20: mod_base = OTHER; note = 2'-O-Methyluridine
  modified_base 21: mod_base = OTHER; note = 2'-O-Methylguanosine
  modified_base 22: mod_base = OTHER; note = 2'-O-Methylcytosine
  modified_base 23: mod_base = OTHER; note = 2'-O-Methyluridine
  modified_base 24: mod_base = OTHER; note = 2'-O-Methyladenosine
  modified_base 25: mod_base = OTHER; note = 2'-O-Methyladenosine
  modified_base 26: mod_base = OTHER; note = 2'-O-Methyladenosine
  modified_base 27: mod_base = OTHER; note = 2'-O-Methyluridine
  modified_base 28: mod_base = OTHER; note = 2'-O-Methylguanosine
  modified_base 29: mod_base = OTHER; note = 2'-O-Methyluridine
  modified_base 30: mod_base = OTHER; note = 2'-O-Methyluridine
  modified_base 31: mod_base = OTHER; note = 2'-O-Methylguanosine
  modified_base 32: mod_base = OTHER; note = 2'-O-Methyluridine
  modified_base 33: mod_base = OTHER; note = 2'-O-Methyluridine
  modified_base 34: mod_base = OTHER; note = 2'-O-Methyladenosine
  modified_base 35: mod_base = OTHER; note = 2'-O-Methyluridine
  modified_base 36: mod_base = OTHER; note = 2'-O-Methyladenosine
  modified_base 37: mod_base = OTHER; note = 2'-O-Methylguanosine
  modified_base 38: mod_base = OTHER; note = 2'-O-Methyluridine
  modified_base 39: mod_base = OTHER; note = 2'-O-Methyladenosine
  modified_base 40: mod_base = OTHER; note = 2'-O-Methyluridine
  modified_base 41: mod_base = OTHER; note = 2'-O-Methylcytosine
  modified_base 42: mod_base = OTHER; note = 2'-O-Methylcytosine
  modified_base 43: mod_base = OTHER; note = 2'-O-Methylcytosine
  modified_base 44: mod_base = OTHER; note = 2'-O-Methyladenosine
  modified_base 45: mod_base = OTHER; note = 2'-O-Methylcytosine
  modified_base 46: mod_base = OTHER; note = 2'-O-Methylguanosine
  modified_base 47: mod_base = OTHER; note = 2'-O-Methylcytosine
  modified_base 48: mod_base = OTHER; note = 2'-O-Methyladenosine
  modified_base 49: mod_base = OTHER; note = 2'-O-Methyladenosine
  modified_base 50: mod_base = OTHER; note = 2'-O-Methyluridine
  modified_base 51: mod_base = OTHER; note = 2'-O-Methylguanosine
  modified_base 53: mod_base = OTHER; note = Cystosine alpha-anomer
  modified_base 55: mod_base = OTHER; note = 2'-O-Methyluridine
  modified_base 56: mod_base = OTHER; note = 2'-O-Methyladenosine
  modified_base 57: mod_base = OTHER; note = 2'-O-Methylguanosine
  modified_base 58: mod_base = OTHER; note = 2'-O-Methyluridine
  modified_base 59: mod_base = OTHER; note = 2'-O-Methylcytosine phosphorothioate
  modified_base 60: mod_base = OTHER; note = 2'-O-Methyladenosine phosphorothioate
  modified_base 61: mod_base = OTHER; note = 2'-O-Methylguanosine phosphorothioate
  modified_base 62: mod_base = OTHER; note = 2'-O-Methylcytosine phosphorothioate
  modified_base 63: mod_base = OTHER; note = 2'-O-Methyladenosine
  misc_feature 1..51: note = RNA
  misc_feature 52: note = DNA
  misc_feature 53: note = RNA
  misc_feature 54: note = DNA
  misc_feature 55..63: note = RNA

SEQ ID NO: 126 - DNA, 63 bp, synthetic construct
  source 1..63: mol_type = other DNA; note = Description of Artificial Sequence: Synthetic oligonucleotide; note = Description of Combined DNA/RNA Molecule: Synthetic oligonucleotide
  modified_base 1: mod_base = OTHER; note = 2'-O-Methylguanosine phosphorothioate
  modified_base 2: mod_base = OTHER; note = 2'-O-Methyluridine phosphorothioate
  modified_base 3: mod_base = OTHER; note = 2'-O-Methylguanosine phosphorothioate
  modified_base 4: mod_base = OTHER; note = 2'-O-Methylguanosine phosphorothioate
  modified_base 5: mod_base = OTHER; note = 2'-O-Methyladenosine
  modified_base 6: mod_base = OTHER; note = 2'-O-Methyladenosine
  modified_base 7: mod_base = OTHER; note = 2'-O-Methyluridine
  modified_base 8: mod_base = OTHER; note = 2'-O-Methyladenosine
  modified_base 9: mod_base = OTHER; note = 2'-O-Methylguanosine
  modified_base 10: mod_base = OTHER; note = 2'-O-Methyluridine
  modified_base 11: mod_base = OTHER; note = 2'-O-Methyladenosine
  modified_base 12: mod_base = OTHER; note = 2'-O-Methyluridine
  modified_base 13: mod_base = OTHER; note = 2'-O-Methyladenosine
  modified_base 14: mod_base = OTHER; note = 2'-O-Methyladenosine
  modified_base 15: mod_base = OTHER; note = 2'-O-Methylcytosine
  modified_base 16: mod_base = OTHER; note = 2'-O-Methyladenosine
  modified_base 17: mod_base = OTHER; note = 2'-O-Methyladenosine
  modified_base 18: mod_base = OTHER; note = 2'-O-Methyluridine
  modified_base 19: mod_base = OTHER; note = 2'-O-Methyladenosine
  modified_base 20: mod_base = OTHER; note = 2'-O-Methyluridine
  modified_base 21: mod_base = OTHER; note = 2'-O-Methylguanosine
  modified_base 22: mod_base = OTHER; note = 2'-O-Methylcytosine
  modified_base 23: mod_base = OTHER; note = 2'-O-Methyluridine
  modified_base 24: mod_base = OTHER; note = 2'-O-Methyladenosine
  modified_base 25: mod_base = OTHER; note = 2'-O-Methyladenosine
  modified_base 26: mod_base = OTHER; note = 2'-O-Methyladenosine
  modified_base 27: mod_base = OTHER; note = 2'-O-Methyluridine
  modified_base 28: mod_base = OTHER; note = 2'-O-Methylguanosine
  modified_base 29: mod_base = OTHER; note = 2'-O-Methyluridine
  modified_base 30: mod_base = OTHER; note = 2'-O-Methyluridine
  modified_base 31: mod_base = OTHER; note = 2'-O-Methylguanosine
  modified_base 32: mod_base = OTHER; note = 2'-O-Methyluridine
  modified_base 33: mod_base = OTHER; note = 2'-O-Methyluridine
  modified_base 34: mod_base = OTHER; note = 2'-O-Methyladenosine
  modified_base 35: mod_base = OTHER; note = 2'-O-Methyluridine
  modified_base 36: mod_base = OTHER; note = 2'-O-Methyladenosine
  modified_base 37: mod_base = OTHER; note = 2'-O-Methylguanosine
  modified_base 38: mod_base = OTHER; note = 2'-O-Methyluridine
  modified_base 39: mod_base = OTHER; note = 2'-O-Methyladenosine
  modified_base 40: mod_base = OTHER; note = 2'-O-Methyluridine
  modified_base 41: mod_base = OTHER; note = 2'-O-Methylcytosine
  modified_base 42: mod_base = OTHER; note = 2'-O-Methylcytosine
  modified_base 43: mod_base = OTHER; note = 2'-O-Methylcytosine
  modified_base 44: mod_base = OTHER; note = 2'-O-Methyladenosine
  modified_base 45: mod_base = OTHER; note = 2'-O-Methylcytosine
  modified_base 46: mod_base = OTHER; note = 2'-O-Methylguanosine
  modified_base 47: mod_base = OTHER; note = 2'-O-Methylcytosine
  modified_base 48: mod_base = OTHER; note = 2'-O-Methyladenosine
  modified_base 49: mod_base = OTHER; note = 2'-O-Methyladenosine
  modified_base 50: mod_base = OTHER; note = 2'-O-Methyluridine
  modified_base 51: mod_base = OTHER; note = 2'-O-Methylguanosine
  modified_base 53: mod_base = OTHER; note = DNA abasic nucleotide
  modified_base 55: mod_base = OTHER; note = 2'-O-Methyluridine
  modified_base 56: mod_base = OTHER; note = 2'-O-Methyladenosine
  modified_base 57: mod_base = OTHER; note = 2'-O-Methylguanosine
  modified_base 58: mod_base = OTHER; note = 2'-O-Methyluridine
  modified_base 59: mod_base = OTHER; note = 2'-O-Methylcytosine phosphorothioate
  modified_base 60: mod_base = OTHER; note = 2'-O-Methyladenosine phosphorothioate
  modified_base 61: mod_base = OTHER; note = 2'-O-Methylguanosine phosphorothioate
  modified_base 62: mod_base = OTHER; note = 2'-O-Methylcytosine phosphorothioate
  modified_base 63: mod_base = OTHER; note = 2'-O-Methyladenosine
  misc_feature 1..51: note = RNA
  misc_feature 52..54: note = DNA
  misc_feature 55..63: note = RNA
gtggaatagtataacaatatgctaaatgttgttatagtatcccacgcaatgcnatagtcagca

SEQ ID NO: 127 - DNA, 63 bp, synthetic construct; identical to SEQ ID NO: 126
  source 1..63: mol_type = other DNA; note = Description of Artificial Sequence: Synthetic oligonucleotide; note = Description of Combined DNA/RNA Molecule: Synthetic oligonucleotide
  modified_base 1: mod_base = OTHER; note = 2'-O-Methylguanosine phosphorothioate
  modified_base 2: mod_base = OTHER; note = 2'-O-Methyluridine phosphorothioate
  modified_base 3: mod_base = OTHER; note = 2'-O-Methylguanosine phosphorothioate
  modified_base 4: mod_base = OTHER; note = 2'-O-Methylguanosine phosphorothioate
  modified_base 5: mod_base = OTHER; note = 2'-O-Methyladenosine
  modified_base 6: mod_base = OTHER; note = 2'-O-Methyladenosine
  modified_base 7: mod_base = OTHER; note = 2'-O-Methyluridine
  modified_base 8: mod_base = OTHER; note = 2'-O-Methyladenosine
  modified_base 9: mod_base = OTHER; note = 2'-O-Methylguanosine
  modified_base 10: mod_base = OTHER; note = 2'-O-Methyluridine
  modified_base 11: mod_base = OTHER; note = 2'-O-Methyladenosine
  modified_base 12: mod_base = OTHER; note = 2'-O-Methyluridine
  modified_base 13: mod_base = OTHER; note = 2'-O-Methyladenosine
  modified_base 14: mod_base = OTHER; note = 2'-O-Methyladenosine
  modified_base 15: mod_base = OTHER; note = 2'-O-Methylcytosine
  modified_base 16: mod_base = OTHER; note = 2'-O-Methyladenosine
  modified_base 17: mod_base = OTHER; note = 2'-O-Methyladenosine
  modified_base 18: mod_base = OTHER; note = 2'-O-Methyluridine
  modified_base 19: mod_base = OTHER; note = 2'-O-Methyladenosine
  modified_base 20: mod_base = OTHER; note = 2'-O-Methyluridine
  modified_base 21: mod_base = OTHER; note = 2'-O-Methylguanosine
  modified_base 22: mod_base = OTHER; note = 2'-O-Methylcytosine
  modified_base 23: mod_base = OTHER; note = 2'-O-Methyluridine
  modified_base 24: mod_base = OTHER; note = 2'-O-Methyladenosine
  modified_base 25: mod_base = OTHER; note = 2'-O-Methyladenosine
  modified_base 26: mod_base = OTHER; note = 2'-O-Methyladenosine
  modified_base 27: mod_base = OTHER; note = 2'-O-Methyluridine
  modified_base 28: mod_base = OTHER; note = 2'-O-Methylguanosine
  modified_base 29: mod_base = OTHER; note = 2'-O-Methyluridine
  modified_base 30: mod_base = OTHER; note = 2'-O-Methyluridine
  modified_base 31: mod_base = OTHER; note = 2'-O-Methylguanosine
  modified_base 32: mod_base = OTHER; note = 2'-O-Methyluridine
  modified_base 33: mod_base = OTHER; note = 2'-O-Methyluridine
  modified_base 34: mod_base = OTHER; note = 2'-O-Methyladenosine
  modified_base 35: mod_base = OTHER; note = 2'-O-Methyluridine
  modified_base 36: mod_base = OTHER; note = 2'-O-Methyladenosine
  modified_base 37: mod_base = OTHER; note = 2'-O-Methylguanosine
  modified_base 38: mod_base = OTHER; note = 2'-O-Methyluridine
  modified_base 39: mod_base = OTHER; note = 2'-O-Methyladenosine
  modified_base 40: mod_base = OTHER; note = 2'-O-Methyluridine
  modified_base 41: mod_base = OTHER; note = 2'-O-Methylcytosine
  modified_base 42: mod_base = OTHER; note = 2'-O-Methylcytosine
  modified_base 43: mod_base = OTHER; note = 2'-O-Methylcytosine
  modified_base 44: mod_base = OTHER; note = 2'-O-Methyladenosine
  modified_base 45: mod_base = OTHER; note = 2'-O-Methylcytosine
  modified_base 46: mod_base = OTHER; note = 2'-O-Methylguanosine
  modified_base 47: mod_base = OTHER; note = 2'-O-Methylcytosine
  modified_base 48: mod_base = OTHER; note = 2'-O-Methyladenosine
  modified_base 49: mod_base = OTHER; note = 2'-O-Methyladenosine
  modified_base 50: mod_base = OTHER; note = 2'-O-Methyluridine
  modified_base 51: mod_base = OTHER; note = 2'-O-Methylguanosine
  modified_base 53: mod_base = OTHER; note = RNA abasic nucleotide
  modified_base 55: mod_base = OTHER; note = 2'-O-Methyluridine
  modified_base 56: mod_base = OTHER; note = 2'-O-Methyladenosine
  modified_base 57: mod_base = OTHER; note = 2'-O-Methylguanosine
  modified_base 58: mod_base = OTHER; note = 2'-O-Methyluridine
  modified_base 59: mod_base = OTHER; note = 2'-O-Methylcytosine phosphorothioate
  modified_base 60: mod_base = OTHER; note = 2'-O-Methyladenosine phosphorothioate
  modified_base 61: mod_base = OTHER; note = 2'-O-Methylguanosine phosphorothioate
  modified_base 62: mod_base = OTHER; note = 2'-O-Methylcytosine phosphorothioate
  modified_base 63: mod_base = OTHER; note = 2'-O-Methyladenosine
  misc_feature 1..51: note = RNA
  misc_feature 52: note = DNA
  misc_feature 53: note = RNA
  misc_feature 54: note = DNA
  misc_feature 55..63: note = RNA

SEQ ID NO: 128 - DNA, 63 bp, synthetic construct; identical to SEQ ID NO: 126
  source 1..63: mol_type = other DNA; note = Description of Artificial Sequence: Synthetic oligonucleotide; note = Description of Combined DNA/RNA Molecule: Synthetic oligonucleotide
  modified_base 1: mod_base = OTHER; note = 2'-O-Methylguanosine phosphorothioate
  modified_base 2: mod_base = OTHER; note = 2'-O-Methyluridine phosphorothioate
  modified_base 3: mod_base = OTHER; note = 2'-O-Methylguanosine phosphorothioate
  modified_base 4: mod_base = OTHER; note = 2'-O-Methylguanosine phosphorothioate
  modified_base 5: mod_base = OTHER; note = 2'-O-Methyladenosine
  modified_base 6: mod_base = OTHER; note = 2'-O-Methyladenosine
  modified_base 7: mod_base = OTHER; note = 2'-O-Methyluridine
  modified_base 8: mod_base = OTHER; note = 2'-O-Methyladenosine
  modified_base 9: mod_base = OTHER; note = 2'-O-Methylguanosine
  modified_base 10: mod_base = OTHER; note = 2'-O-Methyluridine
  modified_base 11: mod_base = OTHER; note = 2'-O-Methyladenosine
  modified_base 12: mod_base = OTHER; note = 2'-O-Methyluridine
  modified_base 13: mod_base = OTHER; note = 2'-O-Methyladenosine
  modified_base 14: mod_base = OTHER; note = 2'-O-Methyladenosine
  modified_base 15: mod_base = OTHER; note = 2'-O-Methylcytosine
  modified_base 16: mod_base = OTHER; note = 2'-O-Methyladenosine
  modified_base 17: mod_base = OTHER; note = 2'-O-Methyladenosine
  modified_base 18: mod_base = OTHER; note = 2'-O-Methyluridine
  modified_base 19: mod_base = OTHER; note = 2'-O-Methyladenosine
  modified_base 20: mod_base = OTHER; note = 2'-O-Methyluridine
  modified_base 21: mod_base = OTHER; note = 2'-O-Methylguanosine
  modified_base 22: mod_base = OTHER; note = 2'-O-Methylcytosine
  modified_base 23: mod_base = OTHER; note = 2'-O-Methyluridine
  modified_base 24: mod_base = OTHER; note = 2'-O-Methyladenosine
  modified_base 25: mod_base = OTHER; note = 2'-O-Methyladenosine
  modified_base 26: mod_base = OTHER; note = 2'-O-Methyladenosine
  modified_base 27: mod_base = OTHER; note = 2'-O-Methyluridine
  modified_base 28: mod_base = OTHER; note = 2'-O-Methylguanosine
  modified_base 29: mod_base = OTHER; note = 2'-O-Methyluridine
  modified_base 30: mod_base = OTHER; note = 2'-O-Methyluridine
  modified_base 31: mod_base = OTHER; note = 2'-O-Methylguanosine
  modified_base 32: mod_base = OTHER; note = 2'-O-Methyluridine
  modified_base 33: mod_base = OTHER; note = 2'-O-Methyluridine
  modified_base 34: mod_base = OTHER; note = 2'-O-Methyladenosine
  modified_base 35: mod_base = OTHER; note = 2'-O-Methyluridine
  modified_base 36: mod_base = OTHER; note = 2'-O-Methyladenosine
  modified_base 37: mod_base = OTHER; note = 2'-O-Methylguanosine
  modified_base 38: mod_base = OTHER; note = 2'-O-Methyluridine
  modified_base 39: mod_base = OTHER; note = 2'-O-Methyladenosine
  modified_base 40: mod_base = OTHER; note = 2'-O-Methyluridine
  modified_base 41: mod_base = OTHER; note = 2'-O-Methylcytosine
  modified_base 42: mod_base = OTHER; note = 2'-O-Methylcytosine
  modified_base 43: mod_base = OTHER; note = 2'-O-Methylcytosine
  modified_base 44: mod_base = OTHER; note = 2'-O-Methyladenosine
  modified_base 45: mod_base = OTHER; note = 2'-O-Methylcytosine
  modified_base 46: mod_base = OTHER; note = 2'-O-Methylguanosine
  modified_base 47: mod_base = OTHER; note = 2'-O-Methylcytosine
  modified_base 48: mod_base = OTHER; note = 2'-O-Methyladenosine
  modified_base 49: mod_base = OTHER; note = 2'-O-Methyladenosine
  modified_base 50: mod_base = OTHER; note = 2'-O-Methyluridine
  modified_base 51: mod_base = OTHER; note = 2'-O-Methylguanosine
  modified_base 53: mod_base = OTHER; note = 2'-O-Methyl abasic nucleotide
  modified_base 55: mod_base = OTHER; note = 2'-O-Methyluridine
  modified_base 56: mod_base = OTHER; note = 2'-O-Methyladenosine
  modified_base 57: mod_base = OTHER; note = 2'-O-Methylguanosine
  modified_base 58: mod_base = OTHER; note = 2'-O-Methyluridine
  modified_base 59: mod_base = OTHER; note = 2'-O-Methylcytosine phosphorothioate
  modified_base 60: mod_base = OTHER; note = 2'-O-Methyladenosine phosphorothioate
  modified_base 61: mod_base = OTHER; note = 2'-O-Methylguanosine phosphorothioate
  modified_base 62: mod_base = OTHER; note = 2'-O-Methylcytosine phosphorothioate
  modified_base 63: mod_base = OTHER; note = 2'-O-Methyladenosine
  misc_feature 1..51: note = RNA
  misc_feature 52: note = DNA
  misc_feature 53: note = RNA
  misc_feature 54: note = DNA
  misc_feature 55..63: note = RNA

SEQ ID NO: 129 - DNA, 63 bp, synthetic construct; identical to SEQ ID NO: 111
  source 1..63: mol_type = other DNA; note = Description of Artificial Sequence: Synthetic oligonucleotide; note = Description of Combined DNA/RNA Molecule: Synthetic oligonucleotide
  modified_base 1: mod_base = OTHER; note = 2'-O-Methylguanosine phosphorothioate
  modified_base 2: mod_base = OTHER; note = 2'-O-Methyluridine phosphorothioate
  modified_base 3: mod_base = OTHER; note = 2'-O-Methylguanosine phosphorothioate
  modified_base 4: mod_base = OTHER; note = 2'-O-Methylguanosine phosphorothioate
  modified_base 5: mod_base = OTHER; note = 2'-O-Methyladenosine
  modified_base 6: mod_base = OTHER; note = 2'-O-Methyladenosine
  modified_base 7: mod_base = OTHER; note = 2'-O-Methyluridine
  modified_base 8: mod_base = OTHER; note = 2'-O-Methyladenosine
  modified_base 9: mod_base = OTHER; note = 2'-O-Methylguanosine
  modified_base 10: mod_base = OTHER; note = 2'-O-Methyluridine
  modified_base 11: mod_base = OTHER; note = 2'-O-Methyladenosine
  modified_base 12: mod_base = OTHER; note = 2'-O-Methyluridine
  modified_base 13: mod_base = OTHER; note = 2'-O-Methyladenosine
  modified_base 14: mod_base = OTHER; note = 2'-O-Methyladenosine
  modified_base 15: mod_base = OTHER; note = 2'-O-Methylcytosine
  modified_base 16: mod_base = OTHER; note = 2'-O-Methyladenosine
  modified_base 17: mod_base = OTHER; note = 2'-O-Methyladenosine
  modified_base 18: mod_base = OTHER; note = 2'-O-Methyluridine
  modified_base 19: mod_base = OTHER; note = 2'-O-Methyladenosine
  modified_base 20: mod_base = OTHER; note = 2'-O-Methyluridine
  modified_base 21: mod_base = OTHER; note = 2'-O-Methylguanosine
  modified_base 22: mod_base = OTHER; note = 2'-O-Methylcytosine
  modified_base 23: mod_base = OTHER; note = 2'-O-Methyluridine
  modified_base 24: mod_base = OTHER; note = 2'-O-Methyladenosine
  modified_base 25: mod_base = OTHER; note = 2'-O-Methyladenosine
  modified_base 26: mod_base = OTHER; note = 2'-O-Methyladenosine
  modified_base 27: mod_base = OTHER; note = 2'-O-Methyluridine
  modified_base 28: mod_base = OTHER; note = 2'-O-Methylguanosine
  modified_base 29: mod_base = OTHER; note = 2'-O-Methyluridine
  modified_base 30: mod_base = OTHER; note = 2'-O-Methyluridine
  modified_base 31: mod_base = OTHER; note = 2'-O-Methylguanosine
  modified_base 32: mod_base = OTHER; note = 2'-O-Methyluridine
  modified_base 33: mod_base = OTHER; note = 2'-O-Methyluridine
  modified_base 34: mod_base = OTHER; note = 2'-O-Methyladenosine
  modified_base 35: mod_base = OTHER; note = 2'-O-Methyluridine
  modified_base 36: mod_base = OTHER; note = 2'-O-Methyladenosine
  modified_base 37: mod_base = OTHER; note = 2'-O-Methylguanosine
  modified_base 38: mod_base = OTHER; note = 2'-O-Methyluridine
  modified_base 39: mod_base = OTHER; note = 2'-O-Methyladenosine
  modified_base 40: mod_base = OTHER; note = 2'-O-Methyluridine
  modified_base 41: mod_base = OTHER; note = 2'-O-Methylcytosine
  modified_base 42: mod_base = OTHER; note = 2'-O-Methylcytosine
  modified_base 43: mod_base = OTHER; note = 2'-O-Methylcytosine
  modified_base 44: mod_base = OTHER; note = 2'-O-Methyladenosine
  modified_base 45: mod_base = OTHER; note = 2'-O-Methylcytosine
  modified_base 46: mod_base = OTHER; note = 2'-O-Methylguanosine
  modified_base 47: mod_base = OTHER; note = 2'-O-Methylcytosine
  modified_base 48: mod_base = OTHER; note = 2'-O-Methyladenosine
  modified_base 49: mod_base = OTHER; note = 2'-O-Methyladenosine
  modified_base 50: mod_base = OTHER; note = 2'-O-Methyluridine
  modified_base 51: mod_base = OTHER; note = 2'-O-Methylguanosine
  modified_base 52: mod_base = OTHER; note = Cytosine (S)-Glycol Nucleic Acid (S-GNA)
  modified_base 55: mod_base = OTHER; note = 2'-O-Methyluridine
  modified_base 56: mod_base = OTHER; note = 2'-O-Methyladenosine
  modified_base 57: mod_base = OTHER; note = 2'-O-Methylguanosine
  modified_base 58: mod_base = OTHER; note = 2'-O-Methyluridine
  modified_base 59: mod_base = OTHER; note = 2'-O-Methylcytosine phosphorothioate
  modified_base 60: mod_base = OTHER; note = 2'-O-Methyladenosine phosphorothioate
  modified_base 61: mod_base = OTHER; note = 2'-O-Methylguanosine phosphorothioate
  modified_base 62: mod_base = OTHER; note = 2'-O-Methylcytosine phosphorothioate
  modified_base 63: mod_base = OTHER; note = 2'-O-Methyladenosine
  misc_feature 1..52: note = RNA
  misc_feature 53..54: note = DNA
  misc_feature 55..63: note = RNA

SEQ ID NO: 130 - DNA, 63 bp, synthetic construct; identical to SEQ ID NO: 111
  source 1..63: mol_type = other DNA; note = Description of Artificial Sequence: Synthetic oligonucleotide; note = Description of Combined DNA/RNA Molecule: Synthetic oligonucleotide
  modified_base 1: mod_base = OTHER; note = 2'-O-Methylguanosine phosphorothioate
  modified_base 2: mod_base = OTHER; note = 2'-O-Methyluridine phosphorothioate
  modified_base 3: mod_base = OTHER; note = 2'-O-Methylguanosine phosphorothioate
  modified_base 4: mod_base = OTHER; note = 2'-O-Methylguanosine phosphorothioate
  modified_base 5: mod_base = OTHER; note = 2'-O-Methyladenosine
  modified_base 6: mod_base = OTHER; note = 2'-O-Methyladenosine
  modified_base 7: mod_base = OTHER; note = 2'-O-Methyluridine
  modified_base 8: mod_base = OTHER; note = 2'-O-Methyladenosine
  modified_base 9: mod_base = OTHER; note = 2'-O-Methylguanosine
  modified_base 10: mod_base = OTHER; note = 2'-O-Methyluridine
  modified_base 11: mod_base = OTHER; note = 2'-O-Methyladenosine
  modified_base 12: mod_base = OTHER; note = 2'-O-Methyluridine
  modified_base 13: mod_base = OTHER; note = 2'-O-Methyladenosine
  modified_base 14: mod_base = OTHER; note = 2'-O-Methyladenosine
  modified_base 15: mod_base = OTHER; note = 2'-O-Methylcytosine
  modified_base 16: mod_base = OTHER; note = 2'-O-Methyladenosine
  modified_base 17: mod_base = OTHER; note = 2'-O-Methyladenosine
  modified_base 18: mod_base = OTHER; note = 2'-O-Methyluridine
  modified_base 19: mod_base = OTHER; note = 2'-O-Methyladenosine
  modified_base 20: mod_base = OTHER; note = 2'-O-Methyluridine
  modified_base 21: mod_base = OTHER; note = 2'-O-Methylguanosine
  modified_base 22: mod_base = OTHER; note = 2'-O-Methylcytosine
  modified_base 23: mod_base = OTHER; note = 2'-O-Methyluridine
  modified_base 24: mod_base = OTHER; note = 2'-O-Methyladenosine
  modified_base 25: mod_base = OTHER; note = 2'-O-Methyladenosine
  modified_base 26: mod_base = OTHER; note = 2'-O-Methyladenosine
  modified_base 27: mod_base = OTHER; note = 2'-O-Methyluridine
  modified_base 28: mod_base = OTHER; note = 2'-O-Methylguanosine
  modified_base 29: mod_base = OTHER; note = 2'-O-Methyluridine
  modified_base 30: mod_base = OTHER; note = 2'-O-Methyluridine
  modified_base 31: mod_base = OTHER; note = 2'-O-Methylguanosine
  modified_base 32: mod_base = OTHER; note = 2'-O-Methyluridine
  modified_base 33: mod_base = OTHER; note = 2'-O-Methyluridine
  modified_base 34: mod_base = OTHER; note = 2'-O-Methyladenosine
  modified_base 35: mod_base = OTHER; note = 2'-O-Methyluridine
  modified_base 36: mod_base = OTHER; note = 2'-O-Methyladenosine
  modified_base 37: mod_base = OTHER; note = 2'-O-Methylguanosine
  modified_base 38: mod_base = OTHER; note = 2'-O-Methyluridine
  modified_base 39: mod_base = OTHER; note = 2'-O-Methyladenosine
  modified_base 40: mod_base = OTHER; note = 2'-O-Methyluridine
  modified_base 41: mod_base = OTHER; note = 2'-O-Methylcytosine
  modified_base 42: mod_base = OTHER; note = 2'-O-Methylcytosine
  modified_base 43: mod_base = OTHER; note = 2'-O-Methylcytosine
  modified_base 44: mod_base = OTHER; note = 2'-O-Methyladenosine
  modified_base 45: mod_base = OTHER; note = 2'-O-Methylcytosine
  modified_base 46: mod_base = OTHER; note = 2'-O-Methylguanosine
  modified_base 47: mod_base = OTHER; note = 2'-O-Methylcytosine
  modified_base 48: mod_base = OTHER; note = 2'-O-Methyladenosine
  modified_base 49: mod_base = OTHER; note = 2'-O-Methyladenosine
  modified_base 50: mod_base = OTHER; note = 2'-O-Methyluridine
  modified_base 51: mod_base = OTHER; note = 2'-O-Methylguanosine
  modified_base 53: mod_base = OTHER; note = Cytosine (S)-Glycol Nucleic Acid (S-GNA)
  modified_base 55: mod_base = OTHER; note = 2'-O-Methyluridine
  modified_base 56: mod_base = OTHER; note = 2'-O-Methyladenosine
  modified_base 57: mod_base = OTHER; note = 2'-O-Methylguanosine
  modified_base 58: mod_base = OTHER; note = 2'-O-Methyluridine
  modified_base 59: mod_base = OTHER; note = 2'-O-Methylcytosine phosphorothioate
  modified_base 60: mod_base = OTHER; note = 2'-O-Methyladenosine phosphorothioate
  modified_base 61: mod_base = OTHER; note = 2'-O-Methylguanosine phosphorothioate
  modified_base 62: mod_base = OTHER; note = 2'-O-Methylcytosine phosphorothioate
  modified_base 63: mod_base = OTHER; note = 2'-O-Methyladenosine
  misc_feature 1..51: note = RNA
  misc_feature 52: note = DNA
  misc_feature 53: note = RNA
  misc_feature 54: note = DNA
  misc_feature 55..63: note = RNA

SEQ ID NO: 131 - DNA, 63 bp, synthetic construct; identical to SEQ ID NO: 111
  source 1..63: mol_type = other DNA; note = Description of Artificial Sequence: Synthetic oligonucleotide; note = Description of Combined DNA/RNA Molecule: Synthetic oligonucleotide
  modified_base 1: mod_base = OTHER; note = 2'-O-Methylguanosine phosphorothioate
  modified_base 2: mod_base = OTHER; note = 2'-O-Methyluridine phosphorothioate
  modified_base 3: mod_base = OTHER; note = 2'-O-Methylguanosine phosphorothioate
  modified_base 4: mod_base = OTHER; note = 2'-O-Methylguanosine phosphorothioate
  modified_base 5: mod_base = OTHER; note = 2'-O-Methyladenosine
  modified_base 6: mod_base = OTHER; note = 2'-O-Methyladenosine
  modified_base 7: mod_base = OTHER; note = 2'-O-Methyluridine
  modified_base 8: mod_base = OTHER; note = 2'-O-Methyladenosine
  modified_base 9: mod_base = OTHER; note = 2'-O-Methylguanosine
  modified_base 10: mod_base = OTHER; note = 2'-O-Methyluridine
  modified_base 11: mod_base = OTHER; note = 2'-O-Methyladenosine
  modified_base 12: mod_base = OTHER; note = 2'-O-Methyluridine
  modified_base 13: mod_base = OTHER; note = 2'-O-Methyladenosine
  modified_base 14: mod_base = OTHER; note = 2'-O-Methyladenosine
  modified_base 15: mod_base = OTHER; note = 2'-O-Methylcytosine
  modified_base 16: mod_base = OTHER; note = 2'-O-Methyladenosine
  modified_base 17: mod_base = OTHER; note = 2'-O-Methyladenosine
  modified_base 18: mod_base = OTHER; note = 2'-O-Methyluridine
  modified_base 19: mod_base = OTHER; note = 2'-O-Methyladenosine
  modified_base 20: mod_base = OTHER; note = 2'-O-Methyluridine
  modified_base 21: mod_base = OTHER; note = 2'-O-Methylguanosine
  modified_base 22: mod_base = OTHER; note = 2'-O-Methylcytosine
  modified_base 23: mod_base = OTHER; note = 2'-O-Methyluridine
  modified_base 24: mod_base = OTHER; note = 2'-O-Methyladenosine
  modified_base 25: mod_base = OTHER; note = 2'-O-Methyladenosine
  modified_base 26: mod_base = OTHER; note = 2'-O-Methyladenosine
  modified_base 27: mod_base = OTHER; note = 2'-O-Methyluridine
  modified_base 28: mod_base = OTHER; note = 2'-O-Methylguanosine
  modified_base 29: mod_base = OTHER; note = 2'-O-Methyluridine
  modified_base 30: mod_base = OTHER; note = 2'-O-Methyluridine
  modified_base 31: mod_base = OTHER; note = 2'-O-Methylguanosine
  modified_base 32: mod_base = OTHER; note = 2'-O-Methyluridine
  modified_base 33: mod_base = OTHER; note = 2'-O-Methyluridine
  modified_base 34: mod_base = OTHER; note = 2'-O-Methyladenosine
  modified_base 35: mod_base = OTHER; note = 2'-O-Methyluridine
  modified_base 36: mod_base = OTHER; note = 2'-O-Methyladenosine
  modified_base 37: mod_base = OTHER; note = 2'-O-Methylguanosine
  modified_base 38: mod_base = OTHER; note = 2'-O-Methyluridine
  modified_base 39: mod_base = OTHER; note = 2'-O-Methyladenosine
  modified_base 40: mod_base = OTHER; note = 2'-O-Methyluridine
  modified_base 41: mod_base = OTHER; note = 2'-O-Methylcytosine
  modified_base 42: mod_base = OTHER; note = 2'-O-Methylcytosine
  modified_base 43: mod_base = OTHER; note = 2'-O-Methylcytosine
  modified_base 44: mod_base = OTHER; note = 2'-O-Methyladenosine
  modified_base 45: mod_base = OTHER; note = 2'-O-Methylcytosine
  modified_base 46: mod_base = OTHER; note = 2'-O-Methylguanosine
  modified_base 47: mod_base = OTHER; note = 2'-O-Methylcytosine
  modified_base 48: mod_base = OTHER; note = 2'-O-Methyladenosine
  modified_base 49: mod_base = OTHER; note = 2'-O-Methyladenosine
  modified_base 50: mod_base = OTHER; note = 2'-O-Methyluridine
  modified_base 51: mod_base = OTHER; note = 2'-O-Methylguanosine
  modified_base 52: mod_base = OTHER; note = Cytosine (S)-Glycol Nucleic Acid (S-GNA)
  modified_base 53: mod_base = OTHER; note = Cytosine (S)-Glycol Nucleic Acid (S-GNA)
  modified_base 55: mod_base = OTHER; note = 2'-O-Methyluridine
  modified_base 56: mod_base = OTHER; note = 2'-O-Methyladenosine
  modified_base 57: mod_base = OTHER; note = 2'-O-Methylguanosine
  modified_base 58: mod_base = OTHER; note = 2'-O-Methyluridine
  modified_base 59: mod_base = OTHER; note = 2'-O-Methylcytosine phosphorothioate
  modified_base 60: mod_base = OTHER; note = 2'-O-Methyladenosine phosphorothioate
  modified_base 61: mod_base = OTHER; note = 2'-O-Methylguanosine phosphorothioate
  modified_base 62: mod_base = OTHER; note = 2'-O-Methylcytosine phosphorothioate
  modified_base 63: mod_base = OTHER; note = 2'-O-Methyladenosine
  misc_feature 1..53: note = RNA
  misc_feature 54: note = DNA
  misc_feature 55..63: note = RNA

SEQ ID NO: 132 - DNA, 63 bp, synthetic construct; identical to SEQ ID NO: 111
  source 1..63: mol_type = other DNA; note = Description of Artificial Sequence: Synthetic oligonucleotide; note = Description of Combined DNA/RNA Molecule: Synthetic oligonucleotide
  modified_base 1: mod_base = OTHER; note = 2'-O-Methylguanosine phosphorothioate
  modified_base 2: mod_base = OTHER; note = 2'-O-Methyluridine phosphorothioate
  modified_base 3: mod_base = OTHER; note = 2'-O-Methylguanosine phosphorothioate
  modified_base 4: mod_base = OTHER; note = 2'-O-Methylguanosine phosphorothioate
  modified_base 5: mod_base = OTHER; note = 2'-O-Methyladenosine
  modified_base 6: mod_base = OTHER; note = 2'-O-Methyladenosine
  modified_base 7: mod_base = OTHER; note = 2'-O-Methyluridine
  modified_base 8: mod_base = OTHER; note = 2'-O-Methyladenosine
  modified_base 9: mod_base = OTHER; note = 2'-O-Methylguanosine
  modified_base 10: mod_base = OTHER; note = 2'-O-Methyluridine
  modified_base 11: mod_base = OTHER; note = 2'-O-Methyladenosine
  modified_base 12: mod_base = OTHER; note = 2'-O-Methyluridine
  modified_base 13: mod_base = OTHER; note = 2'-O-Methyladenosine
  modified_base 14: mod_base = OTHER; note = 2'-O-Methyladenosine
  modified_base 15: mod_base = OTHER; note = 2'-O-Methylcytosine
  modified_base 16: mod_base = OTHER; note = 2'-O-Methyladenosine
  modified_base 17: mod_base = OTHER; note = 2'-O-Methyladenosine
  modified_base 18: mod_base = OTHER; note = 2'-O-Methyluridine
  modified_base 19: mod_base = OTHER; note = 2'-O-Methyladenosine
  modified_base 20: mod_base = OTHER; note = 2'-O-Methyluridine
  modified_base 21: mod_base = OTHER; note = 2'-O-Methylguanosine
  modified_base 22: mod_base = OTHER; note = 2'-O-Methylcytosine
  modified_base 23: mod_base = OTHER; note = 2'-O-Methyluridine
  modified_base 24: mod_base = OTHER; note = 2'-O-Methyladenosine
  modified_base 25: mod_base = OTHER; note = 2'-O-Methyladenosine
  modified_base 26: mod_base = OTHER; note = 2'-O-Methyladenosine
  modified_base 27: mod_base = OTHER; note = 2'-O-Methyluridine
  modified_base 28: mod_base = OTHER; note = 2'-O-Methylguanosine
  modified_base 29: mod_base = OTHER; note = 2'-O-Methyluridine
  modified_base 30: mod_base = OTHER; note = 2'-O-Methyluridine
  modified_base 31: mod_base = OTHER; note = 2'-O-Methylguanosine
  modified_base 32: mod_base = OTHER; note = 2'-O-Methyluridine
  modified_base 33: mod_base = OTHER; note = 2'-O-Methyluridine
  modified_base 34: mod_base = OTHER; note = 2'-O-Methyladenosine
  modified_base 35: mod_base = OTHER; note = 2'-O-Methyluridine
  modified_base 36: mod_base = OTHER; note = 2'-O-Methyladenosine
  modified_base 37: mod_base = OTHER; note = 2'-O-Methylguanosine
  modified_base 38: mod_base = OTHER; note = 2'-O-Methyluridine
  modified_base 39: mod_base = OTHER; note = 2'-O-Methyladenosine
  modified_base 40: mod_base = OTHER; note = 2'-O-Methyluridine
  modified_base 41: mod_base = OTHER; note = 2'-O-Methylcytosine
  modified_base 42: mod_base = OTHER; note = 2'-O-Methylcytosine
  modified_base 43: mod_base = OTHER; note = 2'-O-Methylcytosine
  modified_base 44: mod_base = OTHER; note = 2'-O-Methyladenosine
  modified_base 45: mod_base = OTHER; note = 2'-O-Methylcytosine
  modified_base 46: mod_base = OTHER; note = 2'-O-Methylguanosine
  modified_base 47: mod_base = OTHER; note = 2'-O-Methylcytosine
  modified_base 48: mod_base = OTHER; note = 2'-O-Methyladenosine
  modified_base 49: mod_base = OTHER; note = 2'-O-Methyladenosine
  modified_base 50: mod_base = OTHER; note = 2'-O-Methyluridine
  modified_base 51: mod_base = OTHER; note = 2'-O-Methylguanosine
  modified_base 52: mod_base = OTHER; note = Cytosine (R)-Glycol Nucleic Acid (R-GNA)
  modified_base 55: mod_base = OTHER; note = 2'-O-Methyluridine
  modified_base 56: mod_base = OTHER; note = 2'-O-Methyladenosine
  modified_base 57: mod_base = OTHER; note = 2'-O-Methylguanosine
  modified_base 58: mod_base = OTHER; note = 2'-O-Methyluridine
  modified_base 59: mod_base = OTHER; note = 2'-O-Methylcytosine phosphorothioate
  modified_base 60: mod_base = OTHER; note = 2'-O-Methyladenosine phosphorothioate
  modified_base 61: mod_base = OTHER; note = 2'-O-Methylguanosine phosphorothioate
  modified_base 62: mod_base = OTHER; note = 2'-O-Methylcytosine phosphorothioate
  modified_base 63: mod_base = OTHER; note = 2'-O-Methyladenosine
  misc_feature 1..52: note = RNA
  misc_feature 53..54: note = DNA
  misc_feature 55..63: note = RNA

SEQ ID NO: 133 - DNA, 63 bp, synthetic construct; identical to SEQ ID NO: 111
  source 1..63: mol_type = other DNA; note = Description of Artificial Sequence: Synthetic oligonucleotide; note = Description of Combined DNA/RNA Molecule: Synthetic oligonucleotide
  modified_base 1: mod_base = OTHER; note = 2'-O-Methylguanosine phosphorothioate
  modified_base 2: mod_base = OTHER; note = 2'-O-Methyluridine phosphorothioate
  modified_base 3: mod_base = OTHER; note = 2'-O-Methylguanosine phosphorothioate
  modified_base 4: mod_base = OTHER; note = 2'-O-Methylguanosine phosphorothioate
  modified_base 5: mod_base = OTHER; note = 2'-O-Methyladenosine
  modified_base 6: mod_base = OTHER; note = 2'-O-Methyladenosine
  modified_base 7: mod_base = OTHER; note = 2'-O-Methyluridine
  modified_base 8: mod_base = OTHER; note = 2'-O-Methyladenosine
  modified_base 9: mod_base = OTHER; note = 2'-O-Methylguanosine
  modified_base 10: mod_base = OTHER; note = 2'-O-Methyluridine
  modified_base 11: mod_base = OTHER; note = 2'-O-Methyladenosine
  modified_base 12: mod_base = OTHER; note = 2'-O-Methyluridine
  modified_base 13: mod_base = OTHER; note = 2'-O-Methyladenosine
  modified_base 14: mod_base = OTHER; note = 2'-O-Methyladenosine
  modified_base 15: mod_base = OTHER; note = 2'-O-Methylcytosine
  modified_base 16: mod_base = OTHER; note = 2'-O-Methyladenosine
  modified_base 17: mod_base = OTHER; note = 2'-O-Methyladenosine
  modified_base 18: mod_base = OTHER; note = 2'-O-Methyluridine
  modified_base 19: mod_base = OTHER; note = 2'-O-Methyladenosine
  modified_base 20: mod_base = OTHER; note = 2'-O-Methyluridine
  modified_base 21: mod_base = OTHER; note = 2'-O-Methylguanosine
  modified_base 22: mod_base = OTHER; note = 2'-O-Methylcytosine
  modified_base 23: mod_base = OTHER; note = 2'-O-Methyluridine
  modified_base 24: mod_base = OTHER; note = 2'-O-Methyladenosine
  modified_base 25: mod_base = OTHER; note = 2'-O-Methyladenosine
  modified_base 26: mod_base = OTHER; note = 2'-O-Methyladenosine
  modified_base 27: mod_base = OTHER; note = 2'-O-Methyluridine
  modified_base 28: mod_base = OTHER; note = 2'-O-Methylguanosine
  modified_base 29: mod_base = OTHER; note = 2'-O-Methyluridine
  modified_base 30: mod_base = OTHER; note = 2'-O-Methyluridine
  modified_base 31: mod_base = OTHER; note = 2'-O-Methylguanosine
  modified_base 32: mod_base = OTHER; note = 2'-O-Methyluridine
  modified_base 33: mod_base = OTHER; note = 2'-O-Methyluridine
  modified_base 34: mod_base = OTHER; note = 2'-O-Methyladenosine
  modified_base 35: mod_base = OTHER; note = 2'-O-Methyluridine
  modified_base 36: mod_base = OTHER; note = 2'-O-Methyladenosine
  modified_base 37: mod_base = OTHER; note = 2'-O-Methylguanosine
  modified_base 38: mod_base = OTHER; note = 2'-O-Methyluridine
  modified_base 39: mod_base = OTHER; note = 2'-O-Methyladenosine
  modified_base 40: mod_base = OTHER; note = 2'-O-Methyluridine
  modified_base 41: mod_base = OTHER; note = 2'-O-Methylcytosine
  modified_base 42: mod_base = OTHER; note = 2'-O-Methylcytosine
  modified_base 43: mod_base = OTHER; note = 2'-O-Methylcytosine
  modified_base 44: mod_base = OTHER; note = 2'-O-Methyladenosine
  modified_base 45: mod_base = OTHER; note = 2'-O-Methylcytosine
  modified_base 46: mod_base = OTHER; note = 2'-O-Methylguanosine
  modified_base 47: mod_base = OTHER; note = 2'-O-Methylcytosine
  modified_base 48: mod_base = OTHER; note = 2'-O-Methyladenosine
  modified_base 49: mod_base = OTHER; note = 2'-O-Methyladenosine
  modified_base 50: mod_base = OTHER; note = 2'-O-Methyluridine
  modified_base 51: mod_base = OTHER; note = 2'-O-Methylguanosine
  modified_base 53: mod_base = OTHER; note = Cytosine (R)-Glycol Nucleic Acid (R-GNA)
  modified_base 55: mod_base = OTHER; note = 2'-O-Methyluridine
  modified_base 56: mod_base = OTHER; note = 2'-O-Methyladenosine
  modified_base 57: mod_base = OTHER; note = 2'-O-Methylguanosine
  modified_base 58: mod_base = OTHER; note = 2'-O-Methyluridine
  modified_base 59: mod_base = OTHER; note = 2'-O-Methylcytosine phosphorothioate
  modified_base 60: mod_base = OTHER; note = 2'-O-Methyladenosine phosphorothioate
  modified_base 61: mod_base = OTHER; note = 2'-O-Methylguanosine phosphorothioate
  modified_base 62: mod_base = OTHER; note = 2'-O-Methylcytosine phosphorothioate
  modified_base 63: mod_base = OTHER; note = 2'-O-Methyladenosine
  misc_feature 1..51: note = RNA
  misc_feature 52: note = DNA
  misc_feature 53: note = RNA
  misc_feature 54: note = DNA
  misc_feature 55..63: note = RNA

SEQ ID NO: 134 - DNA, 63 bp, synthetic construct; identical to SEQ ID NO: 111
  source 1..63: mol_type = other DNA; note = Description of Artificial Sequence: Synthetic oligonucleotide; note = Description of Combined DNA/RNA Molecule: Synthetic oligonucleotide
  modified_base 1: mod_base = OTHER; note = 2'-O-Methylguanosine phosphorothioate
  modified_base 2: mod_base = OTHER; note = 2'-O-Methyluridine phosphorothioate
  modified_base 3: mod_base = OTHER; note = 2'-O-Methylguanosine phosphorothioate
  modified_base 4: mod_base = OTHER; note = 2'-O-Methylguanosine phosphorothioate
  modified_base 5: mod_base = OTHER; note = 2'-O-Methyladenosine
  modified_base 6: mod_base = OTHER; note = 2'-O-Methyladenosine
  modified_base 7: mod_base = OTHER; note = 2'-O-Methyluridine
  modified_base 8: mod_base = OTHER; note = 2'-O-Methyladenosine
  modified_base 9: mod_base = OTHER; note = 2'-O-Methylguanosine
  modified_base 10: mod_base = OTHER; note = 2'-O-Methyluridine
  modified_base 11: mod_base = OTHER; note = 2'-O-Methyladenosine
  modified_base 12: mod_base = OTHER; note = 2'-O-Methyluridine
  modified_base 13: mod_base = OTHER; note = 2'-O-Methyladenosine
  modified_base 14: mod_base = OTHER; note = 2'-O-Methyladenosine
  modified_base 15: mod_base = OTHER; note = 2'-O-Methylcytosine
  modified_base 16: mod_base = OTHER; note = 2'-O-Methyladenosine
  modified_base 17: mod_base = OTHER; note = 2'-O-Methyladenosine
  modified_base 18: mod_base = OTHER; note = 2'-O-Methyluridine
  modified_base 19: mod_base = OTHER; note = 2'-O-Methyladenosine
  modified_base 20: mod_base = OTHER; note = 2'-O-Methyluridine
  modified_base 21: mod_base = OTHER; note = 2'-O-Methylguanosine
  modified_base 22: mod_base = OTHER; note = 2'-O-Methylcytosine
  modified_base 23: mod_base = OTHER; note = 2'-O-Methyluridine
  modified_base 24: mod_base = OTHER; note = 2'-O-Methyladenosine
  modified_base 25: mod_base = OTHER; note = 2'-O-Methyladenosine
  modified_base 26: mod_base = OTHER; note = 2'-O-Methyladenosine
  modified_base 27: mod_base = OTHER; note = 2'-O-Methyluridine
  modified_base 28: mod_base = OTHER; note = 2'-O-Methylguanosine
  modified_base 29: mod_base = OTHER; note = 2'-O-Methyluridine
  modified_base 30: mod_base = OTHER; note = 2'-O-Methyluridine
  modified_base 31: mod_base = OTHER; note = 2'-O-Methylguanosine
  modified_base 32: mod_base = OTHER; note = 2'-O-Methyluridine
  modified_base 33: mod_base = OTHER; note = 2'-O-Methyluridine
  modified_base 34: mod_base = OTHER; note = 2'-O-Methyladenosine
  modified_base 35: mod_base = OTHER; note = 2'-O-Methyluridine
  modified_base 36: mod_base = OTHER; note = 2'-O-Methyladenosine
  modified_base 37: mod_base = OTHER; note = 2'-O-Methylguanosine
  modified_base 38: mod_base = OTHER; note = 2'-O-Methyluridine
  modified_base 39: mod_base = OTHER; note = 2'-O-Methyladenosine
  modified_base 40: mod_base = OTHER; note = 2'-O-Methyluridine
  modified_base 41: mod_base = OTHER; note = 2'-O-Methylcytosine
  modified_base 42: mod_base = OTHER; note = 2'-O-Methylcytosine
  modified_base 43: mod_base = OTHER; note = 2'-O-Methylcytosine
  modified_base 44: mod_base = OTHER; note = 2'-O-Methyladenosine
  modified_base 45: mod_base = OTHER; note = 2'-O-Methylcytosine
  modified_base 46: mod_base = OTHER; note = 2'-O-Methylguanosine
  modified_base 47: mod_base = OTHER; note = 2'-O-Methylcytosine
  modified_base 48: mod_base = OTHER; note = 2'-O-Methyladenosine
  modified_base 49: mod_base = OTHER; note = 2'-O-Methyladenosine
  modified_base 50: mod_base = OTHER; note = 2'-O-Methyluridine
  modified_base 51: mod_base = OTHER; note = 2'-O-Methylguanosine
  modified_base 54: mod_base = OTHER; note = Adenosine (R)-Glycol Nucleic Acid (R-GNA)
  modified_base 55: mod_base = OTHER; note = 2'-O-Methyluridine
  modified_base 56: mod_base = OTHER; note = 2'-O-Methyladenosine
  modified_base 57: mod_base = OTHER; note = 2'-O-Methylguanosine
  modified_base 58: mod_base = OTHER; note = 2'-O-Methyluridine
  modified_base 59: mod_base = OTHER; note = 2'-O-Methylcytosine phosphorothioate
  modified_base 60: mod_base = OTHER; note = 2'-O-Methyladenosine phosphorothioate
  modified_base 61: mod_base = OTHER; note = 2'-O-Methylguanosine phosphorothioate
  modified_base 62: mod_base = OTHER; note = 2'-O-Methylcytosine phosphorothioate
  modified_base 63: mod_base = OTHER; note = 2'-O-Methyladenosine
  misc_feature 1..51: note = RNA
  misc_feature 52..53: note = DNA
  misc_feature 54..63: note = RNA

SEQ ID NO: 135 - DNA, 63 bp, synthetic construct; identical to SEQ ID NO: 111
  source 1..63: mol_type = other DNA; note = Description of Artificial Sequence: Synthetic oligonucleotide; note = Description of Combined DNA/RNA Molecule: Synthetic oligonucleotide
  modified_base 1: mod_base = OTHER; note = 2'-O-Methylguanosine phosphorothioate
  modified_base 2: mod_base = OTHER; note = 2'-O-Methyluridine phosphorothioate
  modified_base 3: mod_base = OTHER; note = 2'-O-Methylguanosine phosphorothioate
  modified_base 4: mod_base = OTHER; note = 2'-O-Methylguanosine phosphorothioate
  modified_base 5: mod_base = OTHER; note = 2'-O-Methyladenosine
  modified_base 6: mod_base = OTHER; note = 2'-O-Methyladenosine
  modified_base 7: mod_base = OTHER; note = 2'-O-Methyluridine
  modified_base 8: mod_base = OTHER; note = 2'-O-Methyladenosine
  modified_base 9: mod_base = OTHER; note = 2'-O-Methylguanosine
  modified_base 10: mod_base = OTHER; note = 2'-O-Methyluridine
  modified_base 11: mod_base = OTHER; note = 2'-O-Methyladenosine
  modified_base 12: mod_base = OTHER; note = 2'-O-Methyluridine
  modified_base 13: mod_base = OTHER; note = 2'-O-Methyladenosine
  modified_base 14: mod_base = OTHER; note = 2'-O-Methyladenosine
  modified_base 15: mod_base = OTHER; note = 2'-O-Methylcytosine
  modified_base 16: mod_base = OTHER; note = 2'-O-Methyladenosine
  modified_base 17: mod_base = OTHER; note = 2'-O-Methyladenosine
  modified_base 18: mod_base = OTHER; note = 2'-O-Methyluridine
  modified_base 19: mod_base = OTHER; note = 2'-O-Methyladenosine
  modified_base 20: mod_base = OTHER; note = 2'-O-Methyluridine
  modified_base 21: mod_base = OTHER; note = 2'-O-Methylguanosine
  modified_base 22: mod_base = OTHER; note = 2'-O-Methylcytosine
  modified_base 23: mod_base = OTHER; note = 2'-O-Methyluridine
  modified_base 24: mod_base = OTHER; note = 2'-O-Methyladenosine
  modified_base 25: mod_base = OTHER; note = 2'-O-Methyladenosine
  modified_base 26: mod_base = OTHER; note = 2'-O-Methyladenosine
  modified_base 27: mod_base = OTHER; note = 2'-O-Methyluridine
  modified_base 28: mod_base = OTHER; note = 2'-O-Methylguanosine
  modified_base 29: mod_base = OTHER; note = 2'-O-Methyluridine
  modified_base 30: mod_base = OTHER; note = 2'-O-Methyluridine
  modified_base 31: mod_base = OTHER; note = 2'-O-Methylguanosine
  modified_base 32: mod_base = OTHER; note = 2'-O-Methyluridine
  modified_base 33: mod_base = OTHER; note = 2'-O-Methyluridine
  modified_base 34: mod_base = OTHER; note = 2'-O-Methyladenosine
  modified_base 35: mod_base = OTHER; note = 2'-O-Methyluridine
  modified_base 36: mod_base = OTHER; note = 2'-O-Methyladenosine
  modified_base 37: mod_base = OTHER; note = 2'-O-Methylguanosine
  modified_base 38: mod_base = OTHER; note = 2'-O-Methyluridine
  modified_base 39: mod_base = OTHER; note = 2'-O-Methyladenosine
  modified_base 40: mod_base = OTHER; note = 2'-O-Methyluridine
  modified_base 41: mod_base = OTHER; note = 2'-O-Methylcytosine
  modified_base 42: mod_base = OTHER; note = 2'-O-Methylcytosine
  modified_base 43: mod_base = OTHER; note = 2'-O-Methylcytosine
  modified_base 44: mod_base = OTHER; note = 2'-O-Methyladenosine
  modified_base 45: mod_base = OTHER; note = 2'-O-Methylcytosine
  modified_base 46: mod_base = OTHER; note = 2'-O-Methylguanosine
  modified_base 47: mod_base = OTHER; note = 2'-O-Methylcytosine
  modified_base 48: mod_base = OTHER; note = 2'-O-Methyladenosine
  modified_base 49: mod_base = OTHER; note = 2'-O-Methyladenosine
  modified_base 50: mod_base = OTHER; note = 2'-O-Methyluridine
  modified_base 51: mod_base = OTHER; note = 2'-O-Methylguanosine
  modified_base 52: mod_base = OTHER; note = Cytosine Serineol Nucleic Acid
  modified_base 55: mod_base = OTHER; note = 2'-O-Methyluridine
  modified_base 56: mod_base = OTHER; note = 2'-O-Methyladenosine
  modified_base 57: mod_base = OTHER; note = 2'-O-Methylguanosine
  modified_base 58: mod_base = OTHER; note = 2'-O-Methyluridine
  modified_base 59: mod_base = OTHER; note = 2'-O-Methylcytosine phosphorothioate
  modified_base 60: mod_base = OTHER; note = 2'-O-Methyladenosine phosphorothioate
  modified_base 61: mod_base = OTHER; note = 2'-O-Methylguanosine phosphorothioate
  modified_base 62: mod_base = OTHER; note = 2'-O-Methylcytosine phosphorothioate
  modified_base 63: mod_base = OTHER; note = 2'-O-Methyladenosine
  misc_feature 1..52: note = RNA
  misc_feature 53..54: note = DNA
  misc_feature 55..63: note = RNA

SEQ ID NO: 136 - DNA, 63 bp, synthetic construct; identical to SEQ ID NO: 111
  source 1..63: mol_type = other DNA; note = Description of Artificial Sequence: Synthetic oligonucleotide; note = Description of Combined DNA/RNA Molecule: Synthetic oligonucleotide
  modified_base 1: mod_base = OTHER; note = 2'-O-Methylguanosine phosphorothioate
  modified_base 2: mod_base = OTHER; note = 2'-O-Methyluridine phosphorothioate
  modified_base 3: mod_base = OTHER; note = 2'-O-Methylguanosine phosphorothioate
  modified_base 4: mod_base = OTHER; note = 2'-O-Methylguanosine phosphorothioate
  modified_base 5: mod_base = OTHER; note = 2'-O-Methyladenosine
  modified_base 6: mod_base = OTHER; note = 2'-O-Methyladenosine
  modified_base 7: mod_base = OTHER; note = 2'-O-Methyluridine
  modified_base 8: mod_base = OTHER; note = 2'-O-Methyladenosine
  modified_base 9: mod_base = OTHER; note = 2'-O-Methylguanosine
  modified_base 10: mod_base = OTHER; note = 2'-O-Methyluridine
  modified_base 11: mod_base = OTHER; note = 2'-O-Methyladenosine
  modified_base 12: mod_base = OTHER; note = 2'-O-Methyluridine
  modified_base 13: mod_base = OTHER; note = 2'-O-Methyladenosine
  modified_base 14: mod_base = OTHER; note = 2'-O-Methyladenosine
  modified_base 15: mod_base = OTHER; note = 2'-O-Methylcytosine
  modified_base 16: mod_base = OTHER; note = 2'-O-Methyladenosine
  modified_base 17: mod_base = OTHER; note = 2'-O-Methyladenosine
  modified_base 18: mod_base = OTHER; note = 2'-O-Methyluridine
  modified_base 19: mod_base = OTHER; note = 2'-O-Methyladenosine
  modified_base 20: mod_base = OTHER; note = 2'-O-Methyluridine
  modified_base 21: mod_base = OTHER; note = 2'-O-Methylguanosine
  modified_base 22: mod_base = OTHER; note = 2'-O-Methylcytosine
  modified_base 23: mod_base = OTHER; note = 2'-O-Methyluridine
  modified_base 24: mod_base = OTHER; note = 2'-O-Methyladenosine
  modified_base 25: mod_base = OTHER; note = 2'-O-Methyladenosine
  modified_base 26: mod_base = OTHER; note = 2'-O-Methyladenosine
  modified_base 27: mod_base = OTHER; note = 2'-O-Methyluridine
  modified_base 28: mod_base = OTHER; note = 2'-O-Methylguanosine
  modified_base 29: mod_base = OTHER; note = 2'-O-Methyluridine
  modified_base 30: mod_base = OTHER; note = 2'-O-Methyluridine
  modified_base 31: mod_base = OTHER; note = 2'-O-Methylguanosine
  modified_base 32: mod_base = OTHER; note = 2'-O-Methyluridine
  modified_base 33: mod_base = OTHER; note = 2'-O-Methyluridine
  modified_base 34: mod_base = OTHER; note = 2'-O-Methyladenosine
  modified_base 35: mod_base = OTHER; note = 2'-O-Methyluridine
  modified_base 36: mod_base = OTHER; note = 2'-O-Methyladenosine
  modified_base 37: mod_base = OTHER; note = 2'-O-Methylguanosine
  modified_base 38: mod_base = OTHER; note = 2'-O-Methyluridine
  modified_base 39: mod_base = OTHER; note = 2'-O-Methyladenosine
  modified_base 40: mod_base = OTHER; note = 2'-O-Methyluridine
  modified_base 41: mod_base = OTHER; note = 2'-O-Methylcytosine
  modified_base 42: mod_base = OTHER; note = 2'-O-Methylcytosine
  modified_base 43: mod_base = OTHER; note = 2'-O-Methylcytosine
  modified_base 44: mod_base = OTHER; note = 2'-O-Methyladenosine
  modified_base 45: mod_base = OTHER; note = 2'-O-Methylcytosine
  modified_base 46: mod_base = OTHER; note = 2'-O-Methylguanosine
  modified_base 47: mod_base = OTHER; note = 2'-O-Methylcytosine
  modified_base 48: mod_base = OTHER; note = 2'-O-Methyladenosine
  modified_base 49: mod_base = OTHER; note = 2'-O-Methyladenosine
  modified_base 50: mod_base = OTHER; note = 2'-O-Methyluridine
  modified_base 51: mod_base = OTHER; note = 2'-O-Methylguanosine
  modified_base 53: mod_base = OTHER; note = Cytosine Serineol Nucleic Acid
  modified_base 55: mod_base = OTHER; note = 2'-O-Methyluridine
  modified_base 56: mod_base = OTHER; note = 2'-O-Methyladenosine
  modified_base 57: mod_base = OTHER; note = 2'-O-Methylguanosine
  modified_base 58: mod_base = OTHER; note = 2'-O-Methyluridine
  modified_base 59: mod_base = OTHER; note = 2'-O-Methylcytosine phosphorothioate
  modified_base 60: mod_base = OTHER; note = 2'-O-Methyladenosine phosphorothioate
  modified_base 61: mod_base = OTHER; note = 2'-O-Methylguanosine phosphorothioate
  modified_base 62: mod_base = OTHER; note = 2'-O-Methylcytosine phosphorothioate
  modified_base 63: mod_base = OTHER; note = 2'-O-Methyladenosine
  misc_feature 1..51: note = RNA
  misc_feature 52: note = DNA
  misc_feature 53: note = RNA
  misc_feature 54: note = DNA
  misc_feature 55..63: note = RNA

SEQ ID NO: 137 - DNA, 63 bp, synthetic construct; identical to SEQ ID NO: 111
  source 1..63: mol_type = other DNA; note = Description of Artificial Sequence: Synthetic oligonucleotide; note = Description of Combined DNA/RNA Molecule: Synthetic oligonucleotide
  modified_base 1: mod_base = OTHER; note = 2'-O-Methylguanosine phosphorothioate
  modified_base 2: mod_base = OTHER; note = 2'-O-Methyluridine phosphorothioate
  modified_base 3: mod_base = OTHER; note = 2'-O-Methylguanosine phosphorothioate
  modified_base 4: mod_base = OTHER; note = 2'-O-Methylguanosine phosphorothioate
  modified_base 5: mod_base = OTHER; note = 2'-O-Methyladenosine
  modified_base 6: mod_base = OTHER; note = 2'-O-Methyladenosine
  modified_base 7: mod_base = OTHER; note = 2'-O-Methyluridine
  modified_base 8: mod_base = OTHER; note = 2'-O-Methyladenosine
  modified_base 9: mod_base = OTHER; note = 2'-O-Methylguanosine
  modified_base 10: mod_base = OTHER; note = 2'-O-Methyluridine
  modified_base 11: mod_base = OTHER; note = 2'-O-Methyladenosine
  modified_base 12: mod_base = OTHER; note = 2'-O-Methyluridine
  modified_base 13: mod_base = OTHER; note = 2'-O-Methyladenosine
  modified_base 14: mod_base = OTHER; note = 2'-O-Methyladenosine
  modified_base 15: mod_base = OTHER; note = 2'-O-Methylcytosine
  modified_base 16: mod_base = OTHER; note = 2'-O-Methyladenosine
  modified_base 17: mod_base = OTHER; note = 2'-O-Methyladenosine
  modified_base 18: mod_base = OTHER; note = 2'-O-Methyluridine
  modified_base 19: mod_base = OTHER; note = 2'-O-Methyladenosine
  modified_base 20: mod_base = OTHER; note = 2'-O-Methyluridine
  modified_base 21: mod_base = OTHER; note = 2'-O-Methylguanosine
  modified_base 22: mod_base = OTHER; note = 2'-O-Methylcytosine
  modified_base 23: mod_base = OTHER; note = 2'-O-Methyluridine
  modified_base 24: mod_base = OTHER; note = 2'-O-Methyladenosine
  modified_base 25: mod_base = OTHER; note = 2'-O-Methyladenosine
  modified_base 26: mod_base = OTHER; note = 2'-O-Methyladenosine
  modified_base 27: mod_base = OTHER; note = 2'-O-Methyluridine
  modified_base 28: mod_base = OTHER; note = 2'-O-Methylguanosine
  modified_base 29: mod_base = OTHER; note = 2'-O-Methyluridine
  modified_base 30: mod_base = OTHER; note = 2'-O-Methyluridine
  modified_base 31: mod_base = OTHER; note = 2'-O-Methylguanosine
  modified_base 32: mod_base = OTHER; note = 2'-O-Methyluridine
  modified_base 33: mod_base = OTHER; note = 2'-O-Methyluridine
  modified_base 34: mod_base = OTHER; note = 2'-O-Methyladenosine
  modified_base 35: mod_base = OTHER; note = 2'-O-Methyluridine
  modified_base 36: mod_base = OTHER; note = 2'-O-Methyladenosine
  modified_base 37: mod_base = OTHER; note = 2'-O-Methylguanosine
  modified_base 38: mod_base = OTHER; note = 2'-O-Methyluridine
  modified_base 39: mod_base = OTHER; note = 2'-O-Methyladenosine
  modified_base 40: mod_base = OTHER; note = 2'-O-Methyluridine
  modified_base 41: mod_base = OTHER; note = 2'-O-Methylcytosine
  modified_base 42: mod_base = OTHER; note = 2'-O-Methylcytosine
  modified_base 43: mod_base = OTHER; note = 2'-O-Methylcytosine
  modified_base 44: mod_base = OTHER; note = 2'-O-Methyladenosine
  modified_base 45: mod_base = OTHER; note = 2'-O-Methylcytosine
  modified_base 46: mod_base = OTHER; note = 2'-O-Methylguanosine
  modified_base 47: mod_base = OTHER; note = 2'-O-Methylcytosine
  modified_base 48: mod_base = OTHER; note = 2'-O-Methyladenosine
  modified_base 49: mod_base = OTHER; note = 2'-O-Methyladenosine
  modified_base 50: mod_base = OTHER; note = 2'-O-Methyluridine
  modified_base 51: mod_base = OTHER; note = 2'-O-Methylguanosine
  modified_base 54: mod_base = OTHER; note = Adenosine Serineol Nucleic Acid
  modified_base 55: mod_base = OTHER; note = 2'-O-Methyluridine
  modified_base 56: mod_base = OTHER; note = 2'-O-Methyladenosine
  modified_base 57: mod_base = OTHER; note = 2'-O-Methylguanosine
  modified_base 58: mod_base = OTHER; note = 2'-O-Methyluridine
  modified_base 59: mod_base = OTHER; note = 2'-O-Methylcytosine phosphorothioate
  modified_base 60: mod_base = OTHER; note = 2'-O-Methyladenosine phosphorothioate
  modified_base 61: mod_base = OTHER; note = 2'-O-Methylguanosine phosphorothioate
  modified_base 62: mod_base = OTHER; note = 2'-O-Methylcytosine phosphorothioate
  modified_base 63: mod_base = OTHER; note = 2'-O-Methyladenosine
  misc_feature 1..51: note = RNA
  misc_feature 52..53: note = DNA
  misc_feature 54..63: note = RNA

SEQ ID NO: 138 - DNA, 63 bp, synthetic construct; identical to SEQ ID NO: 111
  source 1..63: mol_type = other DNA; note = Description of Artificial Sequence: Synthetic oligonucleotide; note = Description of Combined DNA/RNA Molecule: Synthetic oligonucleotide
  modified_base 1: mod_base = OTHER; note = 2'-O-Methylguanosine phosphorothioate
  modified_base 2: mod_base = OTHER; note = 2'-O-Methyluridine phosphorothioate
  modified_base 3: mod_base = OTHER; note = 2'-O-Methylguanosine phosphorothioate
  modified_base 4: mod_base = OTHER; note = 2'-O-Methylguanosine phosphorothioate
  modified_base 5: mod_base = OTHER; note = 2'-O-Methyladenosine
  modified_base 6: mod_base = OTHER; note = 2'-O-Methyladenosine
  modified_base 7: mod_base = OTHER; note = 2'-O-Methyluridine
  modified_base 8: mod_base = OTHER; note = 2'-O-Methyladenosine
  modified_base 9: mod_base = OTHER; note = 2'-O-Methylguanosine
  modified_base 10: mod_base = OTHER; note = 2'-O-Methyluridine
  modified_base 11: mod_base = OTHER; note = 2'-O-Methyladenosine
  modified_base 12: mod_base = OTHER; note = 2'-O-Methyluridine
  modified_base 13: mod_base = OTHER; note = 2'-O-Methyladenosine
  modified_base 14: mod_base = OTHER; note = 2'-O-Methyladenosine
  modified_base 15: mod_base = OTHER; note = 2'-O-Methylcytosine
  modified_base 16: mod_base = OTHER; note = 2'-O-Methyladenosine
  modified_base 17: mod_base = OTHER; note = 2'-O-Methyladenosine
  modified_base 18: mod_base = OTHER; note = 2'-O-Methyluridine
  modified_base 19: mod_base = OTHER; note = 2'-O-Methyladenosine
  modified_base 20: mod_base = OTHER; note = 2'-O-Methyluridine
  modified_base 21: mod_base = OTHER; note = 2'-O-Methylguanosine
  modified_base 22: mod_base = OTHER; note = 2'-O-Methylcytosine
  modified_base 23: mod_base = OTHER; note = 2'-O-Methyluridine
  modified_base 24: mod_base = OTHER; note = 2'-O-Methyladenosine
  modified_base 25: mod_base = OTHER; note = 2'-O-Methyladenosine
  modified_base 26: mod_base = OTHER; note = 2'-O-Methyladenosine
  modified_base 27: mod_base = OTHER; note = 2'-O-Methyluridine
  modified_base 28: mod_base = OTHER; note = 2'-O-Methylguanosine
  modified_base 29: mod_base = OTHER; note = 2'-O-Methyluridine
  modified_base 30: mod_base = OTHER; note = 2'-O-Methyluridine
  modified_base 31: mod_base = OTHER; note = 2'-O-Methylguanosine
  modified_base 32: mod_base = OTHER; note = 2'-O-Methyluridine
  modified_base 33: mod_base = OTHER; note = 2'-O-Methyluridine
  modified_base 34: mod_base = OTHER; note = 2'-O-Methyladenosine
  modified_base 35: mod_base = OTHER; note = 2'-O-Methyluridine
  modified_base 36: mod_base = OTHER; note = 2'-O-Methyladenosine
  modified_base 37: mod_base = OTHER; note = 2'-O-Methylguanosine
  modified_base 38: mod_base = OTHER; note = 2'-O-Methyluridine
  modified_base 39: mod_base = OTHER; note = 2'-O-Methyladenosine
  modified_base 40: mod_base = OTHER; note = 2'-O-Methyluridine
  modified_base 41: mod_base = OTHER; note = 2'-O-Methylcytosine
  modified_base 42: mod_base = OTHER; note = 2'-O-Methylcytosine
  modified_base 43: mod_base = OTHER; note = 2'-O-Methylcytosine
  modified_base 44: mod_base = OTHER; note = 2'-O-Methyladenosine
  modified_base 45: mod_base = OTHER; note = 2'-O-Methylcytosine
  modified_base 46: mod_base = OTHER; note = 2'-O-Methylguanosine
  modified_base 47: mod_base = OTHER; note = 2'-O-Methylcytosine
  modified_base 48: mod_base = OTHER; note = 2'-O-Methyladenosine
  modified_base 49: mod_base = OTHER; note = 2'-O-Methyladenosine
  modified_base 50: mod_base = OTHER; note = 2'-O-Methyluridine
  modified_base 51: mod_base = OTHER; note = 2'-O-Methylguanosine
  modified_base 52: mod_base = OTHER; note = Cytosine Flexible Nucleic Acid
  modified_base 55: mod_base = OTHER; note = 2'-O-Methyluridine
  modified_base 56: mod_base = OTHER; note = 2'-O-Methyladenosine
  modified_base 57: mod_base = OTHER; note = 2'-O-Methylguanosine
  modified_base 58: mod_base = OTHER; note = 2'-O-Methyluridine
  modified_base 59: mod_base = OTHER; note = 2'-O-Methylcytosine phosphorothioate
  modified_base 60: mod_base = OTHER; note = 2'-O-Methyladenosine phosphorothioate
  modified_base 61: mod_base = OTHER; note = 2'-O-Methylguanosine phosphorothioate
  modified_base 62: mod_base = OTHER; note = 2'-O-Methylcytosine phosphorothioate
  modified_base 63: mod_base = OTHER; note = 2'-O-Methyladenosine
  misc_feature 1..52: note = RNA
  misc_feature 53..54: note = DNA
  misc_feature 55..63: note = RNA

SEQ ID NO: 139 - DNA, 63 bp, synthetic construct; identical to SEQ ID NO: 111
  source 1..63: mol_type = other DNA; note = Description of Artificial Sequence: Synthetic oligonucleotide; note = Description of Combined DNA/RNA Molecule: Synthetic oligonucleotide
  modified_base 1: mod_base = OTHER; note = 2'-O-Methylguanosine phosphorothioate
  modified_base 2: mod_base = OTHER; note = 2'-O-Methyluridine phosphorothioate
  modified_base 3: mod_base = OTHER; note = 2'-O-Methylguanosine phosphorothioate
  modified_base 4: mod_base = OTHER; note = 2'-O-Methylguanosine phosphorothioate
  modified_base 5: mod_base = OTHER; note = 2'-O-Methyladenosine
  modified_base 6: mod_base = OTHER; note = 2'-O-Methyladenosine
  modified_base 7: mod_base = OTHER; note = 2'-O-Methyluridine
  modified_base 8: mod_base = OTHER; note = 2'-O-Methyladenosine
  modified_base 9: mod_base = OTHER; note = 2'-O-Methylguanosine
  modified_base 10: mod_base = OTHER; note = 2'-O-Methyluridine
  modified_base 11: mod_base = OTHER; note = 2'-O-Methyladenosine
  modified_base 12: mod_base = OTHER; note = 2'-O-Methyluridine
  modified_base 13: mod_base = OTHER; note = 2'-O-Methyladenosine
  modified_base 14: mod_base = OTHER; note = 2'-O-Methyladenosine
  modified_base 15: mod_base = OTHER; note = 2'-O-Methylcytosine
  modified_base 16: mod_base = OTHER; note = 2'-O-Methyladenosine
  modified_base 17: mod_base = OTHER; note = 2'-O-Methyladenosine
  modified_base 18: mod_base = OTHER; note = 2'-O-Methyluridine
  modified_base 19: mod_base = OTHER; note = 2'-O-Methyladenosine
  modified_base 20: mod_base = OTHER; note = 2'-O-Methyluridine
  modified_base 21: mod_base = OTHER; note = 2'-O-Methylguanosine
  modified_base 22: mod_base = OTHER; note = 2'-O-Methylcytosine
  modified_base 23: mod_base = OTHER; note = 2'-O-Methyluridine
  modified_base 24: mod_base = OTHER; note = 2'-O-Methyladenosine
  modified_base 25: mod_base = OTHER; note = 2'-O-Methyladenosine
  modified_base 26: mod_base = OTHER; note = 2'-O-Methyladenosine
  modified_base 27: mod_base = OTHER; note = 2'-O-Methyluridine
  modified_base 28: mod_base = OTHER; note = 2'-O-Methylguanosine
  modified_base 29: mod_base = OTHER; note = 2'-O-Methyluridine
  modified_base 30: mod_base = OTHER; note = 2'-O-Methyluridine
  modified_base 31: mod_base = OTHER; note = 2'-O-Methylguanosine
  modified_base 32: mod_base = OTHER; note = 2'-O-Methyluridine
  modified_base 33: mod_base = OTHER; note = 2'-O-Methyluridine
  modified_base 34: mod_base = OTHER; note = 2'-O-Methyladenosine
  modified_base 35: mod_base = OTHER; note = 2'-O-Methyluridine
  modified_base 36: mod_base = OTHER; note = 2'-O-Methyladenosine
  modified_base 37: mod_base = OTHER; note = 2'-O-Methylguanosine
  modified_base 38: mod_base = OTHER; note = 2'-O-Methyluridine
  modified_base 39: mod_base = OTHER; note = 2'-O-Methyladenosine
  modified_base 40: mod_base = OTHER; note = 2'-O-Methyluridine
  modified_base 41: mod_base = OTHER; note = 2'-O-Methylcytosine
  modified_base 42: mod_base = OTHER; note = 2'-O-Methylcytosine
  modified_base 43: mod_base = OTHER; note = 2'-O-Methylcytosine
  modified_base 44: mod_base = OTHER; note = 2'-O-Methyladenosine
  modified_base 45: mod_base = OTHER; note = 2'-O-Methylcytosine
  modified_base 46: mod_base = OTHER; note = 2'-O-Methylguanosine
  modified_base 47: mod_base = OTHER; note = 2'-O-Methylcytosine
  modified_base 48: mod_base = OTHER; note = 2'-O-Methyladenosine
  modified_base 49: mod_base = OTHER; note = 2'-O-Methyladenosine
  modified_base 50: mod_base = OTHER; note = 2'-O-Methyluridine
  modified_base 51: mod_base = OTHER; note = 2'-O-Methylguanosine
  modified_base 53: mod_base = OTHER; note = Cytosine Flexible Nucleic Acid
  modified_base 55: mod_base = OTHER; note = 2'-O-Methyluridine
  modified_base 56: mod_base = OTHER; note = 2'-O-Methyladenosine
  modified_base 57: mod_base = OTHER; note = 2'-O-Methylguanosine
  modified_base 58: mod_base = OTHER; note = 2'-O-Methyluridine
  modified_base 59: mod_base = OTHER; note = 2'-O-Methylcytosine phosphorothioate
  modified_base 60: mod_base = OTHER; note = 2'-O-Methyladenosine phosphorothioate
  modified_base 61: mod_base = OTHER; note = 2'-O-Methylguanosine phosphorothioate
  modified_base 62: mod_base = OTHER; note = 2'-O-Methylcytosine phosphorothioate
  modified_base 63: mod_base = OTHER; note = 2'-O-Methyladenosine
  misc_feature 1..51: note = RNA
  misc_feature 52: note = DNA
  misc_feature 53: note = RNA
  misc_feature 54: note = DNA
  misc_feature 55..63: note = RNA

SEQ ID NO: 140 - DNA, 63 bp, synthetic construct; identical to SEQ ID NO: 111
  source 1..63: mol_type = other DNA; note = Description of Artificial Sequence: Synthetic oligonucleotide; note = Description of Combined DNA/RNA Molecule: Synthetic oligonucleotide
  modified_base 1: mod_base = OTHER; note = 2'-O-Methylguanosine phosphorothioate
  modified_base 2: mod_base = OTHER; note = 2'-O-Methyluridine phosphorothioate
  modified_base 3: mod_base = OTHER; note = 2'-O-Methylguanosine phosphorothioate
  modified_base 4: mod_base = OTHER; note = 2'-O-Methylguanosine phosphorothioate
  modified_base 5: mod_base = OTHER; note = 2'-O-Methyladenosine
  modified_base 6: mod_base = OTHER; note = 2'-O-Methyladenosine
  modified_base 7: mod_base = OTHER; note = 2'-O-Methyluridine
  modified_base 8: mod_base = OTHER; note = 2'-O-Methyladenosine
  modified_base 9: mod_base = OTHER; note = 2'-O-Methylguanosine
  modified_base 10: mod_base = OTHER; note = 2'-O-Methyluridine
  modified_base 11: mod_base = OTHER; note = 2'-O-Methyladenosine
  modified_base 12: mod_base = OTHER; note = 2'-O-Methyluridine
  modified_base 13: mod_base = OTHER; note = 2'-O-Methyladenosine
  modified_base 14: mod_base = OTHER; note = 2'-O-Methyladenosine
  modified_base 15: mod_base = OTHER; note = 2'-O-Methylcytosine
  modified_base 16: mod_base = OTHER; note = 2'-O-Methyladenosine
  modified_base 17: mod_base = OTHER; note = 2'-O-Methyladenosine
  modified_base 18: mod_base = OTHER; note = 2'-O-Methyluridine
  modified_base 19: mod_base = OTHER; note = 2'-O-Methyladenosine
  modified_base 20: mod_base = OTHER; note = 2'-O-Methyluridine
  modified_base 21: mod_base = OTHER; note = 2'-O-Methylguanosine
  modified_base 22: mod_base = OTHER; note = 2'-O-Methylcytosine
  modified_base 23: mod_base = OTHER; note = 2'-O-Methyluridine
  modified_base 24: mod_base = OTHER; note = 2'-O-Methyladenosine
  modified_base 25: mod_base = OTHER; note = 2'-O-Methyladenosine
  modified_base 26: mod_base = OTHER; note = 2'-O-Methyladenosine
  modified_base 27: mod_base = OTHER; note = 2'-O-Methyluridine
  modified_base 28: mod_base = OTHER; note = 2'-O-Methylguanosine
  modified_base 29: mod_base = OTHER; note = 2'-O-Methyluridine
  modified_base 30: mod_base = OTHER; note = 2'-O-Methyluridine
  modified_base 31: mod_base = OTHER; note = 2'-O-Methylguanosine
  modified_base 32: mod_base = OTHER; note = 2'-O-Methyluridine
  modified_base 33: mod_base = OTHER; note = 2'-O-Methyluridine
  modified_base 34: mod_base = OTHER; note = 2'-O-Methyladenosine
  modified_base 35: mod_base = OTHER; note = 2'-O-Methyluridine
  modified_base 36: mod_base = OTHER; note = 2'-O-Methyladenosine
  modified_base 37: mod_base = OTHER; note = 2'-O-Methylguanosine
  modified_base 38: mod_base = OTHER; note = 2'-O-Methyluridine
  modified_base 39: mod_base = OTHER; note = 2'-O-Methyladenosine
  modified_base 40: mod_base = OTHER; note = 2'-O-Methyluridine
  modified_base 41: mod_base = OTHER; note = 2'-O-Methylcytosine
  modified_base 42: mod_base = OTHER; note = 2'-O-Methylcytosine
  modified_base 43: mod_base = OTHER; note = 2'-O-Methylcytosine
  modified_base 44: mod_base = OTHER; note = 2'-O-Methyladenosine
  modified_base 45: mod_base = OTHER; note = 2'-O-Methylcytosine
  modified_base 46: mod_base = OTHER; note = 2'-O-Methylguanosine
  modified_base 47: mod_base = OTHER; note = 2'-O-Methylcytosine
  modified_base 48: mod_base = OTHER; note = 2'-O-Methyladenosine
  modified_base 49: mod_base = OTHER; note = 2'-O-Methyladenosine
  modified_base 50: mod_base = OTHER; note = 2'-O-Methyluridine
  modified_base 51: mod_base = OTHER; note = 2'-O-Methylguanosine
  modified_base 54: mod_base = OTHER; note = Adenosine Flexible Nucleic Acid
  modified_base 55: mod_base = OTHER; note = 2'-O-Methyluridine
  modified_base 56: mod_base = OTHER; note = 2'-O-Methyladenosine
  modified_base 57: mod_base = OTHER; note = 2'-O-Methylguanosine
  modified_base 58: mod_base = OTHER; note = 2'-O-Methyluridine
  modified_base 59: mod_base = OTHER; note = 2'-O-Methylcytosine phosphorothioate
  modified_base 60: mod_base = OTHER; note = 2'-O-Methyladenosine phosphorothioate
  modified_base 61: mod_base = OTHER; note = 2'-O-Methylguanosine phosphorothioate
  modified_base 62: mod_base = OTHER; note = 2'-O-Methylcytosine phosphorothioate
  modified_base 63: mod_base = OTHER; note = 2'-O-Methyladenosine
  misc_feature 1..51: note = RNA
  misc_feature 52..53: note = DNA
  misc_feature 54..63: note = RNA

SEQ ID NO: 141 - DNA, 63 bp, synthetic construct; identical to SEQ ID NO: 111
  source 1..63: mol_type = other DNA; note = Description of Artificial Sequence: Synthetic oligonucleotide; note = Description of Combined DNA/RNA Molecule: Synthetic oligonucleotide
  modified_base 1: mod_base = OTHER; note = 2'-O-Methylguanosine phosphorothioate
  modified_base 2: mod_base = OTHER; note = 2'-O-Methyluridine phosphorothioate
  modified_base 3: mod_base = OTHER; note = 2'-O-Methylguanosine phosphorothioate
  modified_base 4: mod_base = OTHER; note = 2'-O-Methylguanosine phosphorothioate
  modified_base 5: mod_base = OTHER; note = 2'-O-Methyladenosine
  modified_base 6: mod_base = OTHER; note = 2'-O-Methyladenosine
  modified_base 7: mod_base = OTHER; note = 2'-O-Methyluridine
  modified_base 8: mod_base = OTHER; note = 2'-O-Methyladenosine
  modified_base 9: mod_base = OTHER; note = 2'-O-Methylguanosine
  modified_base 10: mod_base = OTHER; note = 2'-O-Methyluridine
  modified_base 11: mod_base = OTHER; note = 2'-O-Methyladenosine
  modified_base 12: mod_base = OTHER; note = 2'-O-Methyluridine
  modified_base 13: mod_base = OTHER; note = 2'-O-Methyladenosine
  modified_base 14: mod_base = OTHER; note = 2'-O-Methyladenosine
  modified_base 15: mod_base = OTHER; note = 2'-O-Methylcytosine
  modified_base 16: mod_base = OTHER; note = 2'-O-Methyladenosine
  modified_base 17: mod_base = OTHER; note = 2'-O-Methyladenosine
  modified_base 18: mod_base = OTHER; note = 2'-O-Methyluridine
  modified_base 19: mod_base = OTHER; note = 2'-O-Methyladenosine
  modified_base 20: mod_base = OTHER; note = 2'-O-Methyluridine
  modified_base 21: mod_base = OTHER; note = 2'-O-Methylguanosine
  modified_base 22: mod_base = OTHER; note = 2'-O-Methylcytosine
  modified_base 23: mod_base = OTHER; note = 2'-O-Methyluridine
  modified_base 24: mod_base = OTHER; note = 2'-O-Methyladenosine
  modified_base 25: mod_base = OTHER; note = 2'-O-Methyladenosine
  modified_base 26: mod_base = OTHER; note = 2'-O-Methyladenosine
  modified_base 27: mod_base = OTHER; note = 2'-O-Methyluridine
  modified_base 28: mod_base = OTHER; note = 2'-O-Methylguanosine
  modified_base 29: mod_base = OTHER; note = 2'-O-Methyluridine
  modified_base 30: mod_base = OTHER; note = 2'-O-Methyluridine
  modified_base 31: mod_base = OTHER; note = 2'-O-Methylguanosine
  modified_base 32: mod_base = OTHER; note = 2'-O-Methyluridine
  modified_base 33: mod_base = OTHER; note = 2'-O-Methyluridine
  modified_base 34: mod_base = OTHER; note = 2'-O-Methyladenosine
  modified_base 35: mod_base = OTHER; note = 2'-O-Methyluridine
  modified_base 36: mod_base = OTHER; note = 2'-O-Methyladenosine
  modified_base 37: mod_base = OTHER; note = 2'-O-Methylguanosine
  modified_base 38: mod_base = OTHER; note = 2'-O-Methyluridine
  modified_base 39: mod_base = OTHER; note = 2'-O-Methyladenosine
  modified_base 40: mod_base = OTHER; note = 2'-O-Methyluridine
  modified_base 41: mod_base = OTHER; note = 2'-O-Methylcytosine
  modified_base 42: mod_base = OTHER; note = 2'-O-Methylcytosine
  modified_base 43: mod_base = OTHER; note = 2'-O-Methylcytosine
  modified_base 44: mod_base = OTHER; note = 2'-O-Methyladenosine
  modified_base 45: mod_base = OTHER; note = 2'-O-Methylcytosine
  modified_base 46: mod_base = OTHER; note = 2'-O-Methylguanosine
  modified_base 47: mod_base = OTHER; note = 2'-O-Methylcytosine
  modified_base 48: mod_base = OTHER; note = 2'-O-Methyladenosine
  modified_base 49: mod_base = OTHER; note = 2'-O-Methyladenosine
  modified_base 50: mod_base = OTHER; note = 2'-O-Methyluridine
  modified_base 51: mod_base = OTHER; note = 2'-O-Methylguanosine
  modified_base 52: mod_base = OTHER; note = Cytosine beta-D-hexitol nucleic acid
  modified_base 55: mod_base = OTHER; note = 2'-O-Methyluridine
  modified_base 56: mod_base = OTHER; note = 2'-O-Methyladenosine
  modified_base 57: mod_base = OTHER; note = 2'-O-Methylguanosine
  modified_base 58: mod_base = OTHER; note = 2'-O-Methyluridine
  modified_base 59: mod_base = OTHER; note = 2'-O-Methylcytosine phosphorothioate
  modified_base 60: mod_base = OTHER; note = 2'-O-Methyladenosine phosphorothioate
  modified_base 61: mod_base = OTHER; note = 2'-O-Methylguanosine phosphorothioate
  modified_base 62: mod_base = OTHER; note = 2'-O-Methylcytosine phosphorothioate
  modified_base 63: mod_base = OTHER; note = 2'-O-Methyladenosine
  misc_feature 1..51: note = RNA
  misc_feature 52..54: note = DNA
  misc_feature 55..63: note = RNA

SEQ ID NO: 142 - DNA, 63 bp, synthetic construct; identical to SEQ ID NO: 111
  source 1..63: mol_type = other DNA; note = Description of Artificial Sequence: Synthetic oligonucleotide; note = Description of Combined DNA/RNA Molecule: Synthetic oligonucleotide
  modified_base 1: mod_base = OTHER; note = 2'-O-Methylguanosine phosphorothioate
  modified_base 2: mod_base = OTHER; note = 2'-O-Methyluridine phosphorothioate
  modified_base 3: mod_base = OTHER; note = 2'-O-Methylguanosine phosphorothioate
  modified_base 4: mod_base = OTHER; note = 2'-O-Methylguanosine phosphorothioate
  modified_base 5: mod_base = OTHER; note = 2'-O-Methyladenosine
  modified_base 6: mod_base = OTHER; note = 2'-O-Methyladenosine
  modified_base 7: mod_base = OTHER; note = 2'-O-Methyluridine
  modified_base 8: mod_base = OTHER; note = 2'-O-Methyladenosine
  modified_base 9: mod_base = OTHER; note = 2'-O-Methylguanosine
  modified_base 10: mod_base = OTHER; note = 2'-O-Methyluridine
  modified_base 11: mod_base = OTHER; note = 2'-O-Methyladenosine
  modified_base 12: mod_base = OTHER; note = 2'-O-Methyluridine
  modified_base 13: mod_base = OTHER; note = 2'-O-Methyladenosine
  modified_base 14: mod_base = OTHER; note = 2'-O-Methyladenosine
  modified_base 15: mod_base = OTHER; note = 2'-O-Methylcytosine
  modified_base 16: mod_base = OTHER; note = 2'-O-Methyladenosine
  modified_base 17: mod_base = OTHER; note = 2'-O-Methyladenosine
  modified_base 18: mod_base = OTHER; note = 2'-O-Methyluridine
  modified_base 19: mod_base = OTHER; note = 2'-O-Methyladenosine
  modified_base 20: mod_base = OTHER; note = 2'-O-Methyluridine
  modified_base 21: mod_base = OTHER; note = 2'-O-Methylguanosine
  modified_base 22: mod_base = OTHER; note = 2'-O-Methylcytosine
  modified_base 23: mod_base = OTHER; note = 2'-O-Methyluridine
  modified_base 24: mod_base = OTHER; note = 2'-O-Methyladenosine
  modified_base 25: mod_base = OTHER; note = 2'-O-Methyladenosine
  modified_base 26: mod_base = OTHER; note = 2'-O-Methyladenosine
  modified_base 27: mod_base = OTHER; note = 2'-O-Methyluridine
  modified_base 28: mod_base = OTHER; note = 2'-O-Methylguanosine
  modified_base 29: mod_base = OTHER; note = 2'-O-Methyluridine
  modified_base 30: mod_base = OTHER; note = 2'-O-Methyluridine
  modified_base 31: mod_base = OTHER; note = 2'-O-Methylguanosine
  modified_base 32: mod_base = OTHER; note = 2'-O-Methyluridine
  modified_base 33: mod_base = OTHER; note = 2'-O-Methyluridine
  modified_base 34: mod_base = OTHER; note = 2'-O-Methyladenosine
  modified_base 35: mod_base = OTHER; note = 2'-O-Methyluridine
  modified_base 36: mod_base = OTHER; note = 2'-O-Methyladenosine
  modified_base 37: mod_base = OTHER; note = 2'-O-Methylguanosine
  modified_base 38: mod_base = OTHER; note = 2'-O-Methyluridine
  modified_base 39: mod_base = OTHER; note = 2'-O-Methyladenosine
  modified_base 40: mod_base = OTHER; note = 2'-O-Methyluridine
  modified_base 41: mod_base = OTHER; note = 2'-O-Methylcytosine
  modified_base 42: mod_base = OTHER; note = 2'-O-Methylcytosine
  modified_base 43: mod_base = OTHER; note = 2'-O-Methylcytosine
  modified_base 44: mod_base = OTHER; note = 2'-O-Methyladenosine
  modified_base 45: mod_base = OTHER; note = 2'-O-Methylcytosine
  modified_base 46: mod_base = OTHER; note = 2'-O-Methylguanosine
  modified_base 47: mod_base = OTHER; note = 2'-O-Methylcytosine
  modified_base 48: mod_base = OTHER; note = 2'-O-Methyladenosine
  modified_base 49: mod_base = OTHER; note = 2'-O-Methyladenosine
  modified_base 50: mod_base = OTHER; note = 2'-O-Methyluridine
  modified_base 51: mod_base = OTHER; note = 2'-O-Methylguanosine
  modified_base 53: mod_base = OTHER; note = Cytosine beta-D-hexitol nucleic acid
  modified_base 55: mod_base = OTHER; note = 2'-O-Methyluridine
  modified_base 56: mod_base = OTHER; note = 2'-O-Methyladenosine
  modified_base 57: mod_base = OTHER; note = 2'-O-Methylguanosine
  modified_base 58: mod_base = OTHER; note = 2'-O-Methyluridine
  modified_base 59: mod_base = OTHER; note = 2'-O-Methylcytosine phosphorothioate
  modified_base 60: mod_base = OTHER; note = 2'-O-Methyladenosine phosphorothioate
  modified_base 61: mod_base = OTHER; note = 2'-O-Methylguanosine phosphorothioate
  modified_base 62: mod_base = OTHER; note = 2'-O-Methylcytosine phosphorothioate
  modified_base 63: mod_base = OTHER; note = 2'-O-Methyladenosine
  misc_feature 1..51: note = RNA
  misc_feature 52..54: note = DNA
  misc_feature 55..63: note = RNA

SEQ ID NO: 143 - DNA, 63 bp, synthetic construct; identical to SEQ ID NO: 111
  source 1..63: mol_type = other DNA; note = Description of Artificial Sequence: Synthetic oligonucleotide; note = Description of Combined DNA/RNA Molecule: Synthetic oligonucleotide
  modified_base 1: mod_base = OTHER; note = 2'-O-Methylguanosine phosphorothioate
  modified_base 2: mod_base = OTHER; note = 2'-O-Methyluridine phosphorothioate
  modified_base 3: mod_base = OTHER; note = 2'-O-Methylguanosine phosphorothioate
  modified_base 4: mod_base = OTHER; note = 2'-O-Methylguanosine phosphorothioate
  modified_base 5: mod_base = OTHER; note = 2'-O-Methyladenosine
  modified_base 6: mod_base = OTHER; note = 2'-O-Methyladenosine
  modified_base 7: mod_base = OTHER; note = 2'-O-Methyluridine
  modified_base 8: mod_base = OTHER; note = 2'-O-Methyladenosine
  modified_base 9: mod_base = OTHER; note = 2'-O-Methylguanosine
  modified_base 10: mod_base = OTHER; note = 2'-O-Methyluridine
  modified_base 11: mod_base = OTHER; note = 2'-O-Methyladenosine
  modified_base 12: mod_base = OTHER; note = 2'-O-Methyluridine
  modified_base 13: mod_base = OTHER; note = 2'-O-Methyladenosine
  modified_base 14: mod_base = OTHER; note = 2'-O-Methyladenosine
  modified_base 15: mod_base = OTHER; note = 2'-O-Methylcytosine
  modified_base 16: mod_base = OTHER; note = 2'-O-Methyladenosine
  modified_base 17: mod_base = OTHER; note = 2'-O-Methyladenosine
  modified_base 18: mod_base = OTHER; note = 2'-O-Methyluridine
  modified_base 19: mod_base = OTHER; note = 2'-O-Methyladenosine
  modified_base 20: mod_base = OTHER; note = 2'-O-Methyluridine
  modified_base 21: mod_base = OTHER; note = 2'-O-Methylguanosine
  modified_base 22: mod_base = OTHER; note = 2'-O-Methylcytosine
  modified_base 23: mod_base = OTHER; note = 2'-O-Methyluridine
  modified_base 24: mod_base = OTHER; note = 2'-O-Methyladenosine
  modified_base 25: mod_base = OTHER; note = 2'-O-Methyladenosine
  modified_base 26: mod_base = OTHER; note = 2'-O-Methyladenosine
  modified_base 27: mod_base = OTHER; note = 2'-O-Methyluridine
  modified_base 28: mod_base = OTHER; note = 2'-O-Methylguanosine
  modified_base 29: mod_base = OTHER; note = 2'-O-Methyluridine
  modified_base 30: mod_base = OTHER; note = 2'-O-Methyluridine
  modified_base 31: mod_base = OTHER; note = 2'-O-Methylguanosine
  modified_base 32: mod_base = OTHER; note = 2'-O-Methyluridine
  modified_base 33: mod_base = OTHER; note = 2'-O-Methyluridine
  modified_base 34: mod_base = OTHER; note = 2'-O-Methyladenosine
  modified_base 35: mod_base = OTHER; note = 2'-O-Methyluridine
  modified_base 36: mod_base = OTHER; note = 2'-O-Methyladenosine
  modified_base 37: mod_base = OTHER; note = 2'-O-Methylguanosine
  modified_base 38: mod_base = OTHER; note = 2'-O-Methyluridine
  modified_base 39: mod_base = OTHER; note = 2'-O-Methyladenosine
  modified_base 40: mod_base = OTHER; note = 2'-O-Methyluridine
  modified_base 41: mod_base = OTHER; note = 2'-O-Methylcytosine
  modified_base 42: mod_base = OTHER; note = 2'-O-Methylcytosine
  modified_base 43: mod_base = OTHER; note = 2'-O-Methylcytosine
  modified_base 44: mod_base = OTHER; note = 2'-O-Methyladenosine
  modified_base 45: mod_base = OTHER; note = 2'-O-Methylcytosine
  modified_base 46: mod_base = OTHER; note = 2'-O-Methylguanosine
  modified_base 47: mod_base = OTHER; note = 2'-O-Methylcytosine
  modified_base 48: mod_base = OTHER; note = 2'-O-Methyladenosine
  modified_base 49: mod_base = OTHER; note = 2'-O-Methyladenosine
  modified_base 50: mod_base = OTHER; note = 2'-O-Methyluridine
  modified_base 51: mod_base = OTHER; note = 2'-O-Methylguanosine
  modified_base 54: mod_base = OTHER; note = Adenosine beta-D-hexitol nucleic acid
  modified_base 55: mod_base = OTHER; note = 2'-O-Methyluridine
  modified_base 56: mod_base = OTHER; note = 2'-O-Methyladenosine
  modified_base 57: mod_base = OTHER; note = 2'-O-Methylguanosine
  modified_base 58: mod_base = OTHER; note = 2'-O-Methyluridine
  modified_base 59: mod_base = OTHER; note = 2'-O-Methylcytosine phosphorothioate
  modified_base 60: mod_base = OTHER; note = 2'-O-Methyladenosine phosphorothioate
  modified_base 61: mod_base = OTHER; note = 2'-O-Methylguanosine phosphorothioate
  modified_base 62: mod_base = OTHER; note = 2'-O-Methylcytosine phosphorothioate
  modified_base 63: mod_base = OTHER; note = 2'-O-Methyladenosine
  misc_feature 1..51: note = RNA
  misc_feature 52..54: note = DNA
  misc_feature 55..63: note = RNA

SEQ ID NO: 144 - DNA, 63 bp, synthetic construct
  source 1..63: mol_type = other DNA; note = Description of Artificial Sequence: Synthetic oligonucleotide; note = Description of Combined DNA/RNA Molecule: Synthetic oligonucleotide
  modified_base 1: mod_base = OTHER; note = 2'-O-Methylguanosine phosphorothioate
  modified_base 2: mod_base = OTHER; note = 2'-O-Methyluridine phosphorothioate
  modified_base 3: mod_base = OTHER; note = 2'-O-Methylguanosine phosphorothioate
  modified_base 4: mod_base = OTHER; note = 2'-O-Methylguanosine phosphorothioate
  modified_base 5: mod_base = OTHER; note = 2'-O-Methyladenosine
  modified_base 6: mod_base = OTHER; note = 2'-O-Methyladenosine
  modified_base 7: mod_base = OTHER; note = 2'-O-Methyluridine
  modified_base 8: mod_base = OTHER; note = 2'-O-Methyladenosine
  modified_base 9: mod_base = OTHER; note = 2'-O-Methylguanosine
  modified_base 10: mod_base = OTHER; note = 2'-O-Methyluridine
  modified_base 11: mod_base = OTHER; note = 2'-O-Methyladenosine
  modified_base 12: mod_base = OTHER; note = 2'-O-Methyluridine
  modified_base 13: mod_base = OTHER; note = 2'-O-Methyladenosine
  modified_base 14: mod_base = OTHER; note = 2'-O-Methyladenosine
  modified_base 15: mod_base = OTHER; note = 2'-O-Methylcytosine
  modified_base 16: mod_base = OTHER; note = 2'-O-Methyladenosine
  modified_base 17: mod_base = OTHER; note = 2'-O-Methyladenosine
  modified_base 18: mod_base = OTHER; note = 2'-O-Methyluridine
  modified_base 19: mod_base = OTHER; note = 2'-O-Methyladenosine
  modified_base 20: mod_base = OTHER; note = 2'-O-Methyluridine
  modified_base 21: mod_base = OTHER; note = 2'-O-Methylguanosine
  modified_base 22: mod_base = OTHER; note = 2'-O-Methylcytosine
  modified_base 23: mod_base = OTHER; note = 2'-O-Methyluridine
  modified_base 24: mod_base = OTHER; note = 2'-O-Methyladenosine
  modified_base 25: mod_base = OTHER; note = 2'-O-Methyladenosine
  modified_base 26: mod_base = OTHER; note = 2'-O-Methyladenosine
  modified_base 27: mod_base = OTHER; note = 2'-O-Methyluridine
  modified_base 28: mod_base = OTHER; note = 2'-O-Methylguanosine
  modified_base 29: mod_base = OTHER; note = 2'-O-Methyluridine
  modified_base 30: mod_base = OTHER; note = 2'-O-Methyluridine
  modified_base 31: mod_base = OTHER; note = 2'-O-Methylguanosine
  modified_base 32: mod_base = OTHER; note = 2'-O-Methyluridine
  modified_base 33: mod_base = OTHER; note = 2'-O-Methyluridine
  modified_base 34: mod_base = OTHER; note = 2'-O-Methyladenosine
  modified_base 35: mod_base = OTHER; note = 2'-O-Methyluridine
  modified_base 36: mod_base = OTHER; note = 2'-O-Methyladenosine
  modified_base 37: mod_base = OTHER; note = 2'-O-Methylguanosine
  modified_base 38: mod_base = OTHER; note = 2'-O-Methyluridine
  modified_base 39: mod_base = OTHER; note = 2'-O-Methyladenosine
  modified_base 40: mod_base = OTHER; note = 2'-O-Methyluridine
  modified_base 41: mod_base = OTHER; note = 2'-O-Methylcytosine
  modified_base 42: mod_base = OTHER; note = 2'-O-Methylcytosine
  modified_base 43: mod_base = OTHER; note = 2'-O-Methylcytosine
  modified_base 44: mod_base = OTHER; note = 2'-O-Methyladenosine
  modified_base 45: mod_base = OTHER; note = 2'-O-Methylcytosine
  modified_base 46: mod_base = OTHER; note = 2'-O-Methylguanosine
  modified_base 47: mod_base = OTHER; note = 2'-O-Methylcytosine
  modified_base 48: mod_base = OTHER; note = 2'-O-Methyladenosine
  modified_base 49: mod_base = OTHER; note = 2'-O-Methyladenosine
  modified_base 50: mod_base = OTHER; note = 2'-O-Methyluridine
  modified_base 51: mod_base = OTHER; note = 2'-O-Methylguanosine
  modified_base 52: mod_base = OTHER; note = Inosine
  modified_base 55: mod_base = OTHER; note = 2'-O-Methyluridine
  modified_base 56: mod_base = OTHER; note = 2'-O-Methyladenosine
  modified_base 57: mod_base = OTHER; note = 2'-O-Methylguanosine
  modified_base 58: mod_base = OTHER; note = 2'-O-Methyluridine
  modified_base 59: mod_base = OTHER; note = 2'-O-Methylcytosine phosphorothioate
  modified_base 60: mod_base = OTHER; note = 2'-O-Methyladenosine phosphorothioate
  modified_base 61: mod_base = OTHER; note = 2'-O-Methylguanosine phosphorothioate
  modified_base 62: mod_base = OTHER; note = 2'-O-Methylcytosine phosphorothioate
  modified_base 63: mod_base = OTHER; note = 2'-O-Methyladenosine
  misc_feature 1..51: note = RNA
  misc_feature 52..54: note = DNA
  misc_feature 55..63: note = RNA
gtggaatagtataacaatatgctaaatgttgttatagtatcccacgcaatgncatagtcagca

SEQ ID NO: 145 - DNA, 63 bp, synthetic construct; identical to SEQ ID NO: 126
  source 1..63: mol_type = other DNA; note = Description of Artificial Sequence: Synthetic oligonucleotide; note = Description of Combined DNA/RNA Molecule: Synthetic oligonucleotide
  modified_base 1: mod_base = OTHER; note = 2'-O-Methylguanosine phosphorothioate
  modified_base 2: mod_base = OTHER; note = 2'-O-Methyluridine phosphorothioate
  modified_base 3: mod_base = OTHER; note = 2'-O-Methylguanosine phosphorothioate
  modified_base 4: mod_base = OTHER; note = 2'-O-Methylguanosine phosphorothioate
  modified_base 5: mod_base = OTHER; note = 2'-O-Methyladenosine
  modified_base 6: mod_base = OTHER; note = 2'-O-Methyladenosine
  modified_base 7: mod_base = OTHER; note = 2'-O-Methyluridine
  modified_base 8: mod_base = OTHER; note = 2'-O-Methyladenosine
  modified_base 9: mod_base = OTHER; note = 2'-O-Methylguanosine
  modified_base 10: mod_base = OTHER; note = 2'-O-Methyluridine
  modified_base 11: mod_base = OTHER; note = 2'-O-Methyladenosine
  modified_base 12: mod_base = OTHER; note = 2'-O-Methyluridine
  modified_base 13: mod_base = OTHER; note = 2'-O-Methyladenosine
  modified_base 14: mod_base = OTHER; note = 2'-O-Methyladenosine
  modified_base 15: mod_base = OTHER; note = 2'-O-Methylcytosine
  modified_base 16: mod_base = OTHER; note = 2'-O-Methyladenosine
  modified_base 17: mod_base = OTHER; note = 2'-O-Methyladenosine
  modified_base 18: mod_base = OTHER; note = 2'-O-Methyluridine
  modified_base 19: mod_base = OTHER; note = 2'-O-Methyladenosine
  modified_base 20: mod_base = OTHER; note = 2'-O-Methyluridine
  modified_base 21: mod_base = OTHER; note = 2'-O-Methylguanosine
  modified_base 22: mod_base = OTHER; note = 2'-O-Methylcytosine
  modified_base 23: mod_base = OTHER; note = 2'-O-Methyluridine
  modified_base 24: mod_base = OTHER; note = 2'-O-Methyladenosine
  modified_base 25: mod_base = OTHER; note = 2'-O-Methyladenosine
  modified_base 26: mod_base = OTHER; note = 2'-O-Methyladenosine
  modified_base 27: mod_base = OTHER; note = 2'-O-Methyluridine
  modified_base 28: mod_base = OTHER; note = 2'-O-Methylguanosine
  modified_base 29: mod_base = OTHER; note = 2'-O-Methyluridine
  modified_base 30: mod_base = OTHER; note = 2'-O-Methyluridine
  modified_base 31: mod_base = OTHER; note = 2'-O-Methylguanosine
  modified_base 32: mod_base = OTHER; note = 2'-O-Methyluridine
  modified_base 33: mod_base = OTHER; note = 2'-O-Methyluridine
  modified_base 34: mod_base = OTHER; note = 2'-O-Methyladenosine
  modified_base 35: mod_base = OTHER; note = 2'-O-Methyluridine
  modified_base 36: mod_base = OTHER; note = 2'-O-Methyladenosine
  modified_base 37: mod_base = OTHER; note = 2'-O-Methylguanosine
  modified_base 38: mod_base = OTHER; note = 2'-O-Methyluridine
  modified_base 39: mod_base = OTHER; note = 2'-O-Methyladenosine
  modified_base 40: mod_base = OTHER; note = 2'-O-Methyluridine
  modified_base 41: mod_base = OTHER; note = 2'-O-Methylcytosine
  modified_base 42: mod_base = OTHER; note = 2'-O-Methylcytosine
  modified_base 43: mod_base = OTHER; note = 2'-O-Methylcytosine
  modified_base 44: mod_base = OTHER; note = 2'-O-Methyladenosine
  modified_base 45: mod_base = OTHER; note = 2'-O-Methylcytosine
  modified_base 46: mod_base = OTHER; note = 2'-O-Methylguanosine
  modified_base 47: mod_base = OTHER; note = 2'-O-Methylcytosine
  modified_base 48: mod_base = OTHER; note = 2'-O-Methyladenosine
  modified_base 49: mod_base = OTHER; note = 2'-O-Methyladenosine
  modified_base 50: mod_base = OTHER; note = 2'-O-Methyluridine
  modified_base 51: mod_base = OTHER; note = 2'-O-Methylguanosine
  modified_base 53: mod_base = OTHER; note = Inosine
  modified_base 55: mod_base = OTHER; note = 2'-O-Methyluridine
  modified_base 56: mod_base = OTHER; note = 2'-O-Methyladenosine
  modified_base 57: mod_base = OTHER; note = 2'-O-Methylguanosine
  modified_base 58: mod_base = OTHER; note = 2'-O-Methyluridine
  modified_base 59: mod_base = OTHER; note = 2'-O-Methylcytosine phosphorothioate
  modified_base 60: mod_base = OTHER; note = 2'-O-Methyladenosine phosphorothioate
  modified_base 61: mod_base = OTHER; note = 2'-O-Methylguanosine phosphorothioate
  modified_base 62: mod_base = OTHER; note = 2'-O-Methylcytosine phosphorothioate
  modified_base 63: mod_base = OTHER; note = 2'-O-Methyladenosine
  misc_feature 1..51: note = RNA
  misc_feature 52..54: note = DNA
  misc_feature 55..63: note = RNA

SEQ ID NO: 146 - DNA, 63 bp, synthetic construct
  source 1..63: mol_type = other DNA; note = Description of Artificial Sequence: Synthetic oligonucleotide; note = Description of Combined DNA/RNA Molecule: Synthetic oligonucleotide
  modified_base 1: mod_base = OTHER; note = 2'-O-Methylguanosine phosphorothioate
  modified_base 2: mod_base = OTHER; note = 2'-O-Methyluridine phosphorothioate
  modified_base 3: mod_base = OTHER; note = 2'-O-Methylguanosine phosphorothioate
  modified_base 4: mod_base = OTHER; note = 2'-O-Methylguanosine phosphorothioate
  modified_base 5: mod_base = OTHER; note = 2'-O-Methyladenosine
  modified_base 6: mod_base = OTHER; note = 2'-O-Methyladenosine
  modified_base 7: mod_base = OTHER; note = 2'-O-Methyluridine
  modified_base 8: mod_base = OTHER; note = 2'-O-Methyladenosine
  modified_base 9: mod_base = OTHER; note = 2'-O-Methylguanosine
  modified_base 10: mod_base = OTHER; note = 2'-O-Methyluridine
  modified_base 11: mod_base = OTHER; note = 2'-O-Methyladenosine
  modified_base 12: mod_base = OTHER; note = 2'-O-Methyluridine
  modified_base 13: mod_base = OTHER; note = 2'-O-Methyladenosine
  modified_base 14: mod_base = OTHER; note = 2'-O-Methyladenosine
  modified_base 15: mod_base = OTHER; note = 2'-O-Methylcytosine
  modified_base 16: mod_base = OTHER; note = 2'-O-Methyladenosine
  modified_base 17: mod_base = OTHER; note = 2'-O-Methyladenosine
  modified_base 18: mod_base = OTHER; note = 2'-O-Methyluridine
  modified_base 19: mod_base = OTHER; note = 2'-O-Methyladenosine
  modified_base 20: mod_base = OTHER; note = 2'-O-Methyluridine
  modified_base 21: mod_base = OTHER; note = 2'-O-Methylguanosine
  modified_base 22: mod_base = OTHER; note = 2'-O-Methylcytosine
  modified_base 23: mod_base = OTHER; note = 2'-O-Methyluridine
  modified_base 24: mod_base = OTHER; note = 2'-O-Methyladenosine
  modified_base 25: mod_base = OTHER; note = 2'-O-Methyladenosine
  modified_base 26: mod_base = OTHER; note = 2'-O-Methyladenosine
  modified_base 27: mod_base = OTHER; note = 2'-O-Methyluridine
  modified_base 28: mod_base = OTHER; note = 2'-O-Methylguanosine
  modified_base 29: mod_base = OTHER; note = 2'-O-Methyluridine
  modified_base 30: mod_base = OTHER; note = 2'-O-Methyluridine
  modified_base 31: mod_base = OTHER; note = 2'-O-Methylguanosine
  modified_base 32: mod_base = OTHER; note = 2'-O-Methyluridine
  modified_base 33: mod_base = OTHER; note = 2'-O-Methyluridine
  modified_base 34: mod_base = OTHER; note = 2'-O-Methyladenosine
  modified_base 35: mod_base = OTHER; note = 2'-O-Methyluridine
  modified_base 36: mod_base = OTHER; note = 2'-O-Methyladenosine
  modified_base 37: mod_base = OTHER; note = 2'-O-Methylguanosine
  modified_base 38: mod_base = OTHER; note = 2'-O-Methyluridine
  modified_base 39: mod_base = OTHER; note = 2'-O-Methyladenosine
  modified_base 40: mod_base = OTHER; note = 2'-O-Methyluridine
  modified_base 41: mod_base = OTHER; note = 2'-O-Methylcytosine
  modified_base 42: mod_base = OTHER; note = 2'-O-Methylcytosine
  modified_base 43: mod_base = OTHER; note = 2'-O-Methylcytosine
  modified_base 44: mod_base = OTHER; note = 2'-O-Methyladenosine
  modified_base 45: mod_base = OTHER; note = 2'-O-Methylcytosine
  modified_base 46: mod_base = OTHER; note = 2'-O-Methylguanosine
  modified_base 47: mod_base = OTHER; note = 2'-O-Methylcytosine
  modified_base 48: mod_base = OTHER; note = 2'-O-Methyladenosine
  modified_base 49: mod_base = OTHER; note = 2'-O-Methyladenosine
  modified_base 50: mod_base = OTHER; note = 2'-O-Methyluridine
  modified_base 51: mod_base = OTHER; note = 2'-O-Methylguanosine
  modified_base 54: mod_base = OTHER; note = Inosine
  modified_base 55: mod_base = OTHER; note = 2'-O-Methyluridine
  modified_base 56: mod_base = OTHER; note = 2'-O-Methyladenosine
  modified_base 57: mod_base = OTHER; note = 2'-O-Methylguanosine
  modified_base 58: mod_base = OTHER; note = 2'-O-Methyluridine
  modified_base 59: mod_base = OTHER; note = 2'-O-Methylcytosine phosphorothioate
  modified_base 60: mod_base = OTHER; note = 2'-O-Methyladenosine phosphorothioate
  modified_base 61: mod_base = OTHER; note = 2'-O-Methylguanosine phosphorothioate
  modified_base 62: mod_base = OTHER; note = 2'-O-Methylcytosine phosphorothioate
  modified_base 63: mod_base = OTHER; note = 2'-O-Methyladenosine
  misc_feature 1..51: note = RNA
  misc_feature 52..54: note = DNA
  misc_feature 55..63: note = RNA
gtggaatagtataacaatatgctaaatgttgttatagtatcccacgcaatgccntagtcagca

SEQ ID NO: 147 - DNA, 63 bp, synthetic construct
  source 1..63: mol_type = other DNA; note = Description of Artificial Sequence: Synthetic oligonucleotide; note = Description of Combined DNA/RNA Molecule: Synthetic oligonucleotide
  modified_base 1: mod_base = OTHER; note = 2'-O-Methylguanosine phosphorothioate
  modified_base 2: mod_base = OTHER; note = 2'-O-Methyluridine phosphorothioate
  modified_base 3: mod_base = OTHER; note = 2'-O-Methylguanosine phosphorothioate
  modified_base 4: mod_base = OTHER; note = 2'-O-Methylguanosine phosphorothioate
  modified_base 5: mod_base = OTHER; note = 2'-O-Methyladenosine
  modified_base 6: mod_base = OTHER; note = 2'-O-Methyladenosine
  modified_base 7: mod_base = OTHER; note = 2'-O-Methyluridine
  modified_base 8: mod_base = OTHER; note = 2'-O-Methyladenosine
  modified_base 9: mod_base = OTHER; note = 2'-O-Methylguanosine
  modified_base 10: mod_base = OTHER; note = 2'-O-Methyluridine
  modified_base 11: mod_base = OTHER; note = 2'-O-Methyladenosine
  modified_base 12: mod_base = OTHER; note = 2'-O-Methyluridine
  modified_base 13: mod_base = OTHER; note = 2'-O-Methyladenosine
  modified_base 14: mod_base = OTHER; note = 2'-O-Methyladenosine
  modified_base 15: mod_base = OTHER; note = 2'-O-Methylcytosine
  modified_base 16: mod_base = OTHER; note = 2'-O-Methyladenosine
  modified_base 17: mod_base = OTHER; note = 2'-O-Methyladenosine
  modified_base 18: mod_base = OTHER; note = 2'-O-Methyluridine
  modified_base 19: mod_base = OTHER; note = 2'-O-Methyladenosine
  modified_base 20: mod_base = OTHER; note = 2'-O-Methyluridine
  modified_base 21: mod_base = OTHER; note = 2'-O-Methylguanosine
  modified_base 22: mod_base = OTHER; note = 2'-O-Methylcytosine
  modified_base 23: mod_base = OTHER; note = 2'-O-Methyluridine
  modified_base 24: mod_base = OTHER; note = 2'-O-Methyladenosine
  modified_base 25: mod_base = OTHER; note = 2'-O-Methyladenosine
  modified_base 26: mod_base = OTHER; note = 2'-O-Methyladenosine
  modified_base 27: mod_base = OTHER; note = 2'-O-Methyluridine
  modified_base 28: mod_base = OTHER; note = 2'-O-Methylguanosine
  modified_base 29: mod_base = OTHER; note = 2'-O-Methyluridine
  modified_base 30: mod_base = OTHER; note = 2'-O-Methyluridine
  modified_base 31: mod_base = OTHER; note = 2'-O-Methylguanosine
  modified_base 32: mod_base = OTHER; note = 2'-O-Methyluridine
  modified_base 33: mod_base = OTHER; note = 2'-O-Methyluridine
  modified_base 34: mod_base = OTHER; note = 2'-O-Methyladenosine
  modified_base 35: mod_base = OTHER; note = 2'-O-Methyluridine
  modified_base 36: mod_base = OTHER; note = 2'-O-Methyladenosine
  modified_base 37: mod_base = OTHER; note = 2'-O-Methylguanosine
  modified_base 38: mod_base = OTHER; note = 2'-O-Methyluridine
  modified_base 39: mod_base = OTHER; note = 2'-O-Methyladenosine
  modified_base 40: mod_base = OTHER; note = 2'-O-Methyluridine
  modified_base 41: mod_base = OTHER; note = 2'-O-Methylcytosine
  modified_base 42: mod_base = OTHER; note = 2'-O-Methylcytosine
  modified_base 43: mod_base = OTHER; note = 2'-O-Methylcytosine
  modified_base 44: mod_base = OTHER; note = 2'-O-Methyladenosine
  modified_base 45: mod_base = OTHER; note = 2'-O-Methylcytosine
  modified_base 46: mod_base = OTHER; note = 2'-O-Methylguanosine
  modified_base 47: mod_base = OTHER; note = 2'-O-Methylcytosine
  modified_base 48: mod_base = OTHER; note = 2'-O-Methyladenosine
  modified_base 49: mod_base = OTHER; note = 2'-O-Methyladenosine
  modified_base 50: mod_base = OTHER; note = 2'-O-Methyluridine
  modified_base 51: mod_base = OTHER; note = 2'-O-Methylguanosine
  modified_base 52: mod_base = OTHER; note = Inosine
  modified_base 53: mod_base = OTHER; note = Inosine
  modified_base 55: mod_base = OTHER; note = 2'-O-Methyluridine
  modified_base 56: mod_base = OTHER; note = 2'-O-Methyladenosine
  modified_base 57: mod_base = OTHER; note = 2'-O-Methylguanosine
  modified_base 58: mod_base = OTHER; note = 2'-O-Methyluridine
  modified_base 59: mod_base = OTHER; note = 2'-O-Methylcytosine phosphorothioate
  modified_base 60: mod_base = OTHER; note = 2'-O-Methyladenosine phosphorothioate
  modified_base 61: mod_base = OTHER; note = 2'-O-Methylguanosine phosphorothioate
  modified_base 62: mod_base = OTHER; note = 2'-O-Methylcytosine phosphorothioate
  modified_base 63: mod_base = OTHER; note = 2'-O-Methyladenosine
  misc_feature 1..51: note = RNA
  misc_feature 52..54: note = DNA
  misc_feature 55..63: note = RNA
gtggaatagtataacaatatgctaaatgttgttatagtatcccacgcaatgnnatagtcagca

SEQ ID NO: 148 - DNA, 63 bp, synthetic construct
  source 1..63: mol_type = other DNA; note = Description of Artificial Sequence: Synthetic oligonucleotide; note = Description of Combined DNA/RNA Molecule: Synthetic oligonucleotide
  modified_base 1: mod_base = OTHER; note = 2'-O-Methylguanosine phosphorothioate
  modified_base 2: mod_base = OTHER; note = 2'-O-Methyluridine phosphorothioate
  modified_base 3: mod_base = OTHER; note = 2'-O-Methylguanosine phosphorothioate
  modified_base 4: mod_base = OTHER; note = 2'-O-Methylguanosine phosphorothioate
  modified_base 5: mod_base = OTHER; note = 2'-O-Methyladenosine
  modified_base 6: mod_base = OTHER; note = 2'-O-Methyladenosine
  modified_base 7: mod_base = OTHER; note = 2'-O-Methyluridine
  modified_base 8: mod_base = OTHER; note = 2'-O-Methyladenosine
  modified_base 9: mod_base = OTHER; note = 2'-O-Methylguanosine
  modified_base 10: mod_base = OTHER; note = 2'-O-Methyluridine
  modified_base 11: mod_base = OTHER; note = 2'-O-Methyladenosine
  modified_base 12: mod_base = OTHER; note = 2'-O-Methyluridine
  modified_base 13: mod_base = OTHER; note = 2'-O-Methyladenosine
  modified_base 14: mod_base = OTHER; note = 2'-O-Methyladenosine
  modified_base 15: mod_base = OTHER; note = 2'-O-Methylcytosine
  modified_base 16: mod_base = OTHER; note = 2'-O-Methyladenosine
  modified_base 17: mod_base = OTHER; note = 2'-O-Methyladenosine
  modified_base 18: mod_base = OTHER; note = 2'-O-Methyluridine
  modified_base 19: mod_base = OTHER; note = 2'-O-Methyladenosine
  modified_base 20: mod_base = OTHER; note = 2'-O-Methyluridine
  modified_base 21: mod_base = OTHER; note = 2'-O-Methylguanosine
  modified_base 22: mod_base = OTHER; note = 2'-O-Methylcytosine
  modified_base 23: mod_base = OTHER; note = 2'-O-Methyluridine
  modified_base 24: mod_base = OTHER; note = 2'-O-Methyladenosine
  modified_base 25: mod_base = OTHER; note = 2'-O-Methyladenosine
  modified_base 26: mod_base = OTHER; note = 2'-O-Methyladenosine
  modified_base 27: mod_base = OTHER; note = 2'-O-Methyluridine
  modified_base 28: mod_base = OTHER; note = 2'-O-Methylguanosine
  modified_base 29: mod_base = OTHER; note = 2'-O-Methyluridine
  modified_base 30: mod_base = OTHER; note = 2'-O-Methyluridine
  modified_base 31: mod_base = OTHER; note = 2'-O-Methylguanosine
  modified_base 32: mod_base = OTHER; note = 2'-O-Methyluridine
  modified_base 33: mod_base = OTHER; note = 2'-O-Methyluridine
  modified_base 34: mod_base = OTHER; note = 2'-O-Methyladenosine
  modified_base 35: mod_base = OTHER; note = 2'-O-Methyluridine
  modified_base 36: mod_base = OTHER; note = 2'-O-Methyladenosine
  modified_base 37: mod_base = OTHER; note = 2'-O-Methylguanosine
  modified_base 38: mod_base = OTHER; note = 2'-O-Methyluridine
  modified_base 39: mod_base = OTHER; note = 2'-O-Methyladenosine
  modified_base 40: mod_base = OTHER; note = 2'-O-Methyluridine
  modified_base 41: mod_base = OTHER; note = 2'-O-Methylcytosine
  modified_base 42: mod_base = OTHER; note = 2'-O-Methylcytosine
  modified_base 43: mod_base = OTHER; note = 2'-O-Methylcytosine
  modified_base 44: mod_base = OTHER; note = 2'-O-Methyladenosine
  modified_base 45: mod_base = OTHER; note = 2'-O-Methylcytosine
  modified_base 46: mod_base = OTHER; note = 2'-O-Methylguanosine
  modified_base 47: mod_base = OTHER; note = 2'-O-Methylcytosine
  modified_base 48: mod_base = OTHER; note = 2'-O-Methyladenosine
  modified_base 49: mod_base = OTHER; note = 2'-O-Methyladenosine
  modified_base 50: mod_base = OTHER; note = 2'-O-Methyluridine
  modified_base 51: mod_base = OTHER; note = 2'-O-Methylguanosine
  modified_base 53: mod_base = OTHER; note = Inosine
  modified_base 54: mod_base = OTHER; note = Inosine
  modified_base 55: mod_base = OTHER; note = 2'-O-Methyluridine
  modified_base 56: mod_base = OTHER; note = 2'-O-Methyladenosine
  modified_base 57: mod_base = OTHER; note = 2'-O-Methylguanosine
  modified_base 58: mod_base = OTHER; note = 2'-O-Methyluridine
  modified_base 59: mod_base = OTHER; note = 2'-O-Methylcytosine phosphorothioate
  modified_base 60: mod_base = OTHER; note = 2'-O-Methyladenosine phosphorothioate
  modified_base 61: mod_base = OTHER; note = 2'-O-Methylguanosine phosphorothioate
  modified_base 62: mod_base = OTHER; note = 2'-O-Methylcytosine phosphorothioate
  modified_base 63: mod_base = OTHER; note = 2'-O-Methyladenosine
  misc_feature 1..51: note = RNA
  misc_feature 52..54: note = DNA
  misc_feature 55..63: note = RNA
gtggaatagtataacaatatgctaaatgttgttatagtatcccacgcaatgcnntagtcagca

SEQ ID NO: 149 - DNA, 63 bp, synthetic construct
  source 1..63: mol_type = other DNA; note = Description of Artificial Sequence: Synthetic oligonucleotide; note = Description of Combined DNA/RNA Molecule: Synthetic oligonucleotide
  modified_base 1: mod_base = OTHER; note = 2'-O-Methylguanosine phosphorothioate
  modified_base 2: mod_base = OTHER; note = 2'-O-Methyluridine phosphorothioate
  modified_base 3: mod_base = OTHER; note = 2'-O-Methylguanosine phosphorothioate
  modified_base 4: mod_base = OTHER; note = 2'-O-Methylguanosine phosphorothioate
  modified_base 5: mod_base = OTHER; note = 2'-O-Methyladenosine
  modified_base 6: mod_base = OTHER; note = 2'-O-Methyladenosine
  modified_base 7: mod_base = OTHER; note = 2'-O-Methyluridine
  modified_base 8: mod_base = OTHER; note = 2'-O-Methyladenosine
  modified_base 9: mod_base = OTHER; note = 2'-O-Methylguanosine
  modified_base 10: mod_base = OTHER; note = 2'-O-Methyluridine
  modified_base 11: mod_base = OTHER; note = 2'-O-Methyladenosine
  modified_base 12: mod_base = OTHER; note = 2'-O-Methyluridine
  modified_base 13: mod_base = OTHER; note = 2'-O-Methyladenosine
  modified_base 14: mod_base = OTHER; note = 2'-O-Methyladenosine
  modified_base 15: mod_base = OTHER; note = 2'-O-Methylcytosine
  modified_base 16: mod_base = OTHER; note = 2'-O-Methyladenosine
  modified_base 17: mod_base = OTHER; note = 2'-O-Methyladenosine
  modified_base 18: mod_base = OTHER; note = 2'-O-Methyluridine
  modified_base 19: mod_base = OTHER; note = 2'-O-Methyladenosine
  modified_base 20: mod_base = OTHER; note = 2'-O-Methyluridine
  modified_base 21: mod_base = OTHER; note = 2'-O-Methylguanosine
  modified_base 22: mod_base = OTHER; note = 2'-O-Methylcytosine
  modified_base 23: mod_base = OTHER; note = 2'-O-Methyluridine
  modified_base 24: mod_base = OTHER; note = 2'-O-Methyladenosine
  modified_base 25: mod_base = OTHER; note = 2'-O-Methyladenosine
  modified_base 26: mod_base = OTHER; note = 2'-O-Methyladenosine
  modified_base 27: mod_base = OTHER; note = 2'-O-Methyluridine
  modified_base 28: mod_base = OTHER; note = 2'-O-Methylguanosine
  modified_base 29: mod_base = OTHER; note = 2'-O-Methyluridine
  modified_base 30: mod_base = OTHER; note = 2'-O-Methyluridine
  modified_base 31: mod_base = OTHER; note = 2'-O-Methylguanosine
  modified_base 32: mod_base = OTHER; note = 2'-O-Methyluridine
  modified_base 33: mod_base = OTHER; note = 2'-O-Methyluridine
  modified_base 34: mod_base = OTHER; note = 2'-O-Methyladenosine
  modified_base 35: mod_base = OTHER; note = 2'-O-Methyluridine
  modified_base 36: mod_base = OTHER; note = 2'-O-Methyladenosine
  modified_base 37: mod_base = OTHER; note = 2'-O-Methylguanosine
  modified_base 38: mod_base = OTHER; note = 2'-O-Methyluridine
  modified_base 39: mod_base = OTHER; note = 2'-O-Methyladenosine
  modified_base 40: mod_base = OTHER; note = 2'-O-Methyluridine
  modified_base 41: mod_base = OTHER; note = 2'-O-Methylcytosine
  modified_base 42: mod_base = OTHER; note = 2'-O-Methylcytosine
  modified_base 43: mod_base = OTHER; note = 2'-O-Methylcytosine
  modified_base 44: mod_base = OTHER; note = 2'-O-Methyladenosine
  modified_base 45: mod_base = OTHER; note = 2'-O-Methylcytosine
  modified_base 46: mod_base = OTHER; note = 2'-O-Methylguanosine
  modified_base 47: mod_base = OTHER; note = 2'-O-Methylcytosine
  modified_base 48: mod_base = OTHER; note = 2'-O-Methyladenosine
  modified_base 49: mod_base = OTHER; note = 2'-O-Methyladenosine
  modified_base 50: mod_base = OTHER; note = 2'-O-Methyluridine
  modified_base 51: mod_base = OTHER; note = 2'-O-Methylguanosine
  modified_base 52: mod_base = OTHER; note = Inosine
  modified_base 54: mod_base = OTHER; note = Inosine
  modified_base 55: mod_base = OTHER; note = 2'-O-Methyluridine
  modified_base 56: mod_base = OTHER; note = 2'-O-Methyladenosine
  modified_base 57: mod_base = OTHER; note = 2'-O-Methylguanosine
  modified_base 58: mod_base = OTHER; note = 2'-O-Methyluridine
  modified_base 59: mod_base = OTHER; note = 2'-O-Methylcytosine phosphorothioate
  modified_base 60: mod_base = OTHER; note = 2'-O-Methyladenosine phosphorothioate
  modified_base 61: mod_base = OTHER; note = 2'-O-Methylguanosine phosphorothioate
  modified_base 62: mod_base = OTHER; note = 2'-O-Methylcytosine phosphorothioate
  modified_base 63: mod_base = OTHER; note = 2'-O-Methyladenosine
  misc_feature 1..51: note = RNA
  misc_feature 52..54: note = DNA
  misc_feature 55..63: note = RNA
gtggaatagtataacaatatgctaaatgttgttatagtatcccacgcaatgncntagtcagca

SEQ ID NO: 150 - DNA, 63 bp, synthetic construct
  source 1..63: mol_type = other DNA; note = Description of Artificial Sequence: Synthetic oligonucleotide; note = Description of Combined DNA/RNA Molecule: Synthetic oligonucleotide
  modified_base 1: mod_base = OTHER; note = 2'-O-Methylguanosine phosphorothioate
  modified_base 2: mod_base = OTHER; note = 2'-O-Methyluridine phosphorothioate
  modified_base 3: mod_base = OTHER; note = 2'-O-Methylguanosine phosphorothioate
  modified_base 4: mod_base = OTHER; note = 2'-O-Methylguanosine phosphorothioate
  modified_base 5: mod_base = OTHER; note = 2'-O-Methyladenosine
  modified_base 6: mod_base = OTHER; note = 2'-O-Methyladenosine
  modified_base 7: mod_base = OTHER; note = 2'-O-Methyluridine
  modified_base 8: mod_base = OTHER; note = 2'-O-Methyladenosine
  modified_base 9: mod_base = OTHER; note = 2'-O-Methylguanosine
  modified_base 10: mod_base = OTHER; note = 2'-O-Methyluridine
  modified_base 11: mod_base = OTHER; note = 2'-O-Methyladenosine
  modified_base 12: mod_base = OTHER; note = 2'-O-Methyluridine
  modified_base 13: mod_base = OTHER; note = 2'-O-Methyladenosine
  modified_base 14: mod_base = OTHER; note = 2'-O-Methyladenosine
  modified_base 15: mod_base = OTHER; note = 2'-O-Methylcytosine
  modified_base 16: mod_base = OTHER; note = 2'-O-Methyladenosine
  modified_base 17: mod_base = OTHER; note = 2'-O-Methyladenosine
  modified_base 18: mod_base = OTHER; note = 2'-O-Methyluridine
  modified_base 19: mod_base = OTHER; note = 2'-O-Methyladenosine
  modified_base 20: mod_base = OTHER; note = 2'-O-Methyluridine
  modified_base 21: mod_base = OTHER; note = 2'-O-Methylguanosine
  modified_base 22: mod_base = OTHER; note = 2'-O-Methylcytosine
  modified_base 23: mod_base = OTHER; note = 2'-O-Methyluridine
  modified_base 24: mod_base = OTHER; note = 2'-O-Methyladenosine
  modified_base 25: mod_base = OTHER; note = 2'-O-Methyladenosine
  modified_base 26: mod_base = OTHER; note = 2'-O-Methyladenosine
  modified_base 27: mod_base = OTHER; note = 2'-O-Methyluridine
  modified_base 28: mod_base = OTHER; note = 2'-O-Methylguanosine
  modified_base 29: mod_base = OTHER; note = 2'-O-Methyluridine
  modified_base 30: mod_base = OTHER; note = 2'-O-Methyluridine
  modified_base 31: mod_base = OTHER; note = 2'-O-Methylguanosine
  modified_base 32: mod_base = OTHER; note = 2'-O-Methyluridine
  modified_base 33: mod_base = OTHER; note = 2'-O-Methyluridine
  modified_base 34: mod_base = OTHER; note = 2'-O-Methyladenosine
  modified_base 35: mod_base = OTHER; note = 2'-O-Methyluridine
  modified_base 36: mod_base = OTHER; note = 2'-O-Methyladenosine
  modified_base 37: mod_base = OTHER; note = 2'-O-Methylguanosine
  modified_base 38: mod_base = OTHER; note = 2'-O-Methyluridine
  modified_base 39: mod_base = OTHER; note = 2'-O-Methyladenosine
  modified_base 40: mod_base = OTHER; note = 2'-O-Methyluridine
  modified_base 41: mod_base = OTHER; note = 2'-O-Methylcytosine
  modified_base 42: mod_base = OTHER; note = 2'-O-Methylcytosine
  modified_base 43: mod_base = OTHER; note = 2'-O-Methylcytosine
  modified_base 44: mod_base = OTHER; note = 2'-O-Methyladenosine
  modified_base 45: mod_base = OTHER; note = 2'-O-Methylcytosine
  modified_base 46: mod_base = OTHER; note = 2'-O-Methylguanosine
  modified_base 47: mod_base = OTHER; note = 2'-O-Methylcytosine
  modified_base 48: mod_base = OTHER; note = 2'-O-Methyladenosine
  modified_base 49: mod_base = OTHER; note = 2'-O-Methyladenosine
  modified_base 50: mod_base = OTHER; note = 2'-O-Methyluridine
  modified_base 51: mod_base = OTHER; note = 2'-O-Methylguanosine
  modified_base 52: mod_base = OTHER; note = Inosine
  modified_base 53: mod_base = OTHER; note = Inosine
  modified_base 54: mod_base = OTHER; note = Inosine
  modified_base 55: mod_base = OTHER; note = 2'-O-Methyluridine
  modified_base 56: mod_base = OTHER; note = 2'-O-Methyladenosine
  modified_base 57: mod_base = OTHER; note = 2'-O-Methylguanosine
  modified_base 58: mod_base = OTHER; note = 2'-O-Methyluridine
  modified_base 59: mod_base = OTHER; note = 2'-O-Methylcytosine phosphorothioate
  modified_base 60: mod_base = OTHER; note = 2'-O-Methyladenosine phosphorothioate
  modified_base 61: mod_base = OTHER; note = 2'-O-Methylguanosine phosphorothioate
  modified_base 62: mod_base = OTHER; note = 2'-O-Methylcytosine phosphorothioate
  modified_base 63: mod_base = OTHER; note = 2'-O-Methyladenosine
  misc_feature 1..51: note = RNA
  misc_feature 52..54: note = DNA
  misc_feature 55..63: note = RNA
gtggaatagtataacaatatgctaaatgttgttatagtatcccacgcaatgnnntagtcagca

1. A method of editing an LRRK2 polynucleotide comprising a single nucleotide polymorphism (SNP) associated with Parkinson's Disease, the method comprising contacting the LRRK2 polynucleotide with a guide oligonucleotide capable of effecting an adenosine deaminase acting on RNA (ADAR)-mediated adenosine to inosine alteration of the SNP associated with Parkinson's Disease, thereby editing the LRRK2 polynucleotide.

2. (canceled)

3. The method of claim 1, wherein the cell endogenously expresses ADAR.

4-9. (canceled)

10. A method of treating Parkinson's Disease in a subject in need thereof, the method comprising
contacting the LRRK2 polynucleotide in a cell of the subject with a guide oligonucleotide capable of effecting an adenosine deaminase acting on RNA (ADAR)-mediated adenosine to inosine alteration of the SNP associated with Parkinson's Disease, thereby treating the subject.

11. A method of treating Parkinson's Disease in a subject in need thereof, the method comprising
contacting the LRRK2 polynucleotide in a cell with a guide oligonucleotide capable of effecting an adenosine deaminase acting on RNA (ADAR)-mediated adenosine to inosine alteration of the SNP associated with Parkinson's Disease, and
administering the cell to the subject, thereby treating the subject.

12. (canceled)

13. (canceled)

14. The method of claim 1, wherein the guide oligonucleotide comprises a nucleic acid sequence complementary to an LRRK2 mRNA sequence comprising the SNP associated with Parkinson's Disease.

15. The method of claim 1, wherein the oligonucleotide further comprises one or more adenosine deaminase acting on RNA (ADAR)-recruiting domains.

16. The method of claim 1, wherein the LRRK2 polynucleotide encodes an LRRK2 protein comprising a pathogenic amino acid comprising a serine at position 2019 or a histidine at position 1441 resulting from the SNP.

17. The method of claim 16, wherein the adenosine to inosine alteration substitutes the pathogenic amino acid with a wild type amino acid, wherein the wild type amino acid at position 2019 comprises a glycine, and wherein the wild type amino acid at position 1441 comprises an arginine.

18. (canceled)

19. The method of claim 1, wherein the guide oligonucleotide comprises the structure:
[Aₘ]-X¹—X²—X³—[Bₙ]
wherein each of A and B is a nucleotide;
m and n are each, independently, an integer from 5 to 40;
X¹, X², and X³ are each, independently, a nucleotide, wherein at least one of X¹, X², or X³ is an alternative nucleotide.

20. The method of claim 1, wherein the guide oligonucleotide comprises the structure:
[Aₘ]-X¹—X²—X³—[Bₙ]
wherein each of A and B is a nucleotide;
m and n are each, independently, an integer from 5 to 40;
X¹, X², and X³ are each, independently, a nucleotide, wherein at least one of X¹, X², or X³ has the structure of any one of Formula I-IV: [chemical structure]
wherein N¹ is hydrogen or a nucleobase;
R¹ is hydroxy, halogen, or C₁-C₆ alkoxy;
R² is hydrogen, hydroxy, halogen, or C₁-C₆ alkoxy; and
R³ is hydrogen, hydroxy, halogen, or C₁-C₆ alkoxy.

21-27. (canceled)

28. The method of claim 20, wherein at least one of X¹, X², and X³ has the structure of Formula I, wherein R¹ is fluoro, hydroxy, or O-methyl and N¹ is a nucleobase.

29-102. (canceled)

103. The method of claim 1, wherein the guide oligonucleotide comprises the structure:
[Aₘ]-X¹—X²—X³—[Bₙ]
wherein each of A and B is a nucleotide;
m and n are each, independently, an integer from 5 to 40;
X¹, X², and X³ are each, independently, a nucleotide, wherein at least one of X¹, X², and X³ has the structure of any one of Formula XII-XV: [chemical structure]
wherein N¹ is hydrogen or a nucleobase;
R⁶ is hydrogen, hydroxy, or halogen;
R⁷ is hydrogen, hydroxy, halogen, or C₁-C₆ alkoxy;
R⁸ is hydrogen or halogen;
R⁹ is hydrogen or hydroxy, halogen, or C₁-C₆ alkoxy;
R¹⁰ Is hydrogen or halogen; and
R¹¹ is hydrogen or hydroxy, halogen, or C₁-C₆ alkoxy.

104-106. (canceled)

107. The method of claim 103, wherein at least one of X¹, X², and X³ has the structure of Formula XIII, in which each of R⁸ and R⁹ is hydrogen.

108-128. (canceled)

129. The method of claim 19, wherein each of [Aₘ] and [Bn] comprises at least four terminal phosphorothioate linkages.

130-137. (canceled)

138. The method of claim 19, wherein at least 20% of the nucleotides of [Aₘ] and [Bₙ] combined are 2′-O-methyl-nucleotides.

139-144. (canceled)

145. The method of claim 20, wherein at least one of X¹, X², and X³ has the structure of Formula I, wherein R¹ is fluoro, hydroxy, or methoxy and N¹ is a nucleobase each of X¹, X², and X³ that does not have the structure of Formula I is a ribonucleotide; [Aₘ] and [Bₙ] each comprise at least five terminal 2′-O-methyl-nucleotides and at least four terminal phosphorothioate linkages; and at least 20% of the nucleotides of [Aₘ] and [Bₙ] combined are 2′-O-methyl-nucleotides.

146. (canceled)

147. The method of claim 103, wherein at least of X¹, X², and X³ has the structure of Formula XIII, wherein R⁸ and R⁹ are each hydrogen, and each of X¹, X² and X³ that does not have the structure of Formula XII is a ribonucleotide; [Aₘ] and [Bₙ] each include at least five terminal 2′-O-methyl-nucleotides and at least four terminal phosphorothioate linkages; and at least 20% of the nucleotides of [Aₘ] and [Bₙ] combined are 2′-O-methyl-nucleotides.
